United States Patent Application Publication US 2026/0092266 A1 - sequence listing, part 30

SEQ ID NO: 8571 - protein, 1170 aa, synthetic construct
  REGION 1..1170: note = Synthetic
MRKILGLDIGTNSIGFSLNEINIKNEQTTFNELISNSIIFSEYIKAEDRRKFRSGRRRNERNNRRKQIVRKLLFDFNLADNIILTQPIKYFNKLSQNQNPYILRKLAVNGKSLTKDEFTFALYSIISRRGYSNQFKTEDSKDDGVITEPIKKNKTIYLEDKLAVPSLVLLNKKTELEKDGFINVAIRNKKDNYNNSLGRELWQEELEILLDSQKNNLELFEDIDKYETFKHKLLKGVNKNSLGIFEQRPLKSMEGMVGYCSFYNLYHENPQKRVSKSHISSIEFTLRQRIENSILGNLIFNDKTGEFYNPTQEEINNTIELWLKKPPIQTINTKNIFDKAGLKNIKIKIAEKQDDTILDIKLHKQILEIFIDTNIDIFEKHRDLYTKILEKIHYFVNKDQIVKEIKKVDIQNILDDETIDKLSKVDKGNKESYASFSLLFVDELLAKMKEGKSYQDSLTEIGYFRKYLDIKPYDYLPPLNPSLNDIKWLKKNVKNFKVEHLFYQPLVSPNVKRVISILRKLVNDLTKKHGKIDQIIIETARELNSKKEEDKIKESQANSRKEIKEAEKLLKANKYEITNKNIERVRLFTEQKAKCLYSGNPMTIEDALDETVSEVEHFIPRSKIWINSYKNKILVFKKYNQNKSDKHPIIYLRSKNTWEDFIERVKENITNKSKIFWLTDEENINKNWERENLEDRFLNDTRSATKIIANYLEHYLYPKQNEHGKDETNSNIIRVTGKAINELKRLWGVNKVQPKNENDKKDRTTNYHHTIDAIVISLLNSSAKKALNDFFKQNEDGFKTKAILENLSSRFPKTKNGVSLVDFVKEKVTKYENNELYICPMIKKRDNIVGFKDGNIKLYWDEKKKEFCQLDKHEISIKSILFKKEGQNEKERSDNEVEKFVDELVNKLDLQKQNNIKEAILNYKENLLLTRTKIKSLEEHIKGLKGNLPNKKDYIDTPETLDIKEQMKVLDKEKQTQNEIQNEPCYFLTNKRQKQIIRNIKIKTKEASKVDSIIITDKAKTSRVQRLTKDIYDELKSNDTPFVAKLNDTTLNVDLYNTIKGQVIGLNYFSSIKNDMSPKIYKTKIPLIKDFEDKITIQKGDLIEIENLKDNTKKYYVFNGGGKISAGNNKLVLKSINTKDEFQITLNKDTIAKKVFINYQGDISYEEFKK

SEQ ID NO: 8572 - protein, 1170 aa, synthetic construct
  REGION 1..1170: note = Synthetic
MERILGLDLGTNSIGFALNKVEEKDSITIFNELASNSIIFSEYVPSTDRRAFRSGRRRNERASRRKENIRKLFCYFNLASKNILDNPIEYFNNLTKLYKEPYSLREEAIKGKKLSKDEFTFALYTIISRRGYTNLFAKEEDENKAKESEKINSAILNNKNIYKNSNYTLPSKVLTLKKEELEEDGFINIAIRNKKDNYNNSLDRKLWQEEAELLIESQKNNIELFKDIKTYEDFKNKFINGVNKNSKGIFEQRNLKSVEDMVGFCSFYNLYSKEPQKRVINAHIKAIEFVLRQRIENSILGNLILNKKTGEFVKISKEDIETTINFWLYTPNVQTITAKNIFKNAGLKDLEIQTSDKQDDTVQDISVHKALLEIVDFETILKNEEFYSKLLEVLHYFVSEQQIKDEIKKLNKENILSEEQIDKIANINKAKSSYLSFSLKFIDEILQKLKNDISYQTCLEELGYFKRYTQMEAYNYLPPLNPSIEDIKWLEKNVKNFKSEQLFYQPLISPNVKRVISILRRLVNELISKYGKIDKIIIETARELNSKKDEDKIKKSQEQSNKEIKDAQTLLKSGNKELSNKNILRARLLKEQKSKCLYSGEGLTLEEALDENITEIEHFIPRSKIWIDSYKNKILVLKKYNQNKSNQHPVSFLKSIGKWENFVGRVDEFIANKDKKICLTDEKNIQKIWDNEKLEDRFLNDTRSATKIVANYLEHYLFPKQNEYGKGESNDKVIRVTGKAINELKKLWGINEAQPKNEEGKKDRDTNYHHTIDAIVISLLNNSSKKALNDFFKQKEDKFKTKAILEKLKTRFPISKNGKSLFEFVKDKVEKYEKNELYVCPYMKKRENIRGFKDGNIKLIWDKELNNFSQIDKVEINKKLLLNNFGKDLKDDEVKKEFEKIKDKLNLPKQNNIKIALEEYEKRLLEIRKKINNISEEIKQEQNNLPRDKKAIETVEILEIKNRIEKLEQTKKEFVKELEFPCFFYTKDGKKQIVRSLNLKSNSVTKADSIIITDKKQKNRVQRLTKEVYENLKSSKTPFVAKLNDNTLSVDLYNTLKGQLIGLNYFSSIKNDILPKIDERKIKLISNYDDKITVSKNNIIEIEDLKNGTKNYYTCNGGGEIGKGKNVIKVDNINTKNKSVIPIQIADYRIVKPVKINFFGKISYEEFKKN

SEQ ID NO: 8573 - protein, 1168 aa, synthetic construct
  REGION 1..1168: note = Synthetic
MKKVLGLDIGTNSIGFSLNEISIENGQTIFKELTSNSIIFSEYIKAEDRRAFRSSRRRNERKSRRNGIVRKLLSDFNLAKKSIVTKPIKYFNKLSKDKDPYILRQEAVNGKNLSKDDFTFSLYSIITRRGYSNQFKTEDSNDEGVINEAISQNKELYLKNELSIPSQVLLNKKFNLEKNGFTNIAIRNKKDNYNNSLDRNLWKEELEILLESQKENKELFETIEIYDSLKNKLINGVNENSKGVFEQRSLKSMEDMVGYCSFYNKFHRNPQKRVLKSHISSIELTIRQRIENSISGNLIFNDKTGEIFTPTKEQIDNTIELWLKRPPTKTINTKNIFDKTGLKNIKIETLNKQDETVLDIGIHVQLLEIFKKTDLDIFKTHKDLYSKILKKIFYFVNKEQILKEIKKIDEENLLNDETIKELSKVSKGIKDTYASFSLCFIEEILEKMKSGKNYHDSLADLGYFRKYLNMEPYSYLLPLNPSEKDLIWLEKNIENFKREHIFYQPLVSPNVKRVISILRRLINDLISQYGKIDKIIIETARELNSKTEEEQIKEAQANSRKEIKAAEKLLLSDNCELSKKNIERARLLIEQKSKCLYSGEPLTLEDALDEQKTEVEHFIPRSKIWINSYKNKILVLKKHNQDKSNTHPIAYLKSKNSWEEFTSRVKKELTNTSKIFWLTNEENINKNWEKENLEDRFLNDTRSATKIISNYLEHYLFPKQNEFGKGETNQNVIRVTGKAISELKRLWGVDKVQPKNEDDKKDRQTNYHHTIDAIIISLLNESAKKALNDFFKQNENGFKTKEILEKIKTRFPITSDGVNIVEFIKEKVKRYENNEIYICPVIKKRDNVVGFKDGNVKLYLDKEKEEFYQIDKKAIDKNLLFDNYGKDISDKEVNKKVEDLISHLDLPKQENIKNALLEYKNKLLITRENISNIKKEIIELKGALPNKKNYEDTEQTIAIKDKLFRLDELKKDNELLQNEPCFFITKKGLKQIVRNIKVKTSSASKADSLIITDKTQKDRLKRLSLDVYKELKEKDIPFVAKLNDTTLNVDLFNTSKGQVIGLNYFSSIRNNIPPKINEKKIALIKDYEDKITIQKGDILEIENLKESTKEYFIFNGGGNIAGSNNKLELKSLNRKEVKRIFMTLNKDTIARKVFINYQGDISYEEFKK

SEQ ID NO: 8574 - protein, 1170 aa, synthetic construct
  REGION 1..1170: note = Synthetic
MLKVLGLDLGTNSIGFALNEIEEKDGVIVFNELASNSIIFTEYMNAEDRRNFRSGRRRNERTSRRKENTRKLLVSFNLATKNILDNPIEYFNSLTKLYKEPYTLREEAIKGKRLTKDEFTFSLYTIISRRGYTNLFATQDDEKEAKESEKINSAIQNNKNIYKNNNFLLPSKVLTVKKENLEKDGFINVAIRNKKDNYNNSLDRKLWQEELEKLCDSQKNNKELFKDLETFEKFKDKLLNGVNNNSLGIFEQRDLKSVEDMVGYCSFYNLYHKNKQKRVINAHIKAIEFIIRQRIENSISGNLIVNKKTGEFESLSKEDIETTIKFWLETPNVQKITAKNIFKNVGINDLEIKTSDKQDDTVQDITTHKAISEIINYEMIIKNEDFYSELLEVLHYYVSKEQIIAEILKINKDKILTNEQIEKLSNINKNSSSYMSFSLKFIDELLQKMKKGISYNDSLTELGYFKKYTNMKAYEYLPPLNPKDEDINWLERNITNFKKEDIFYQPLISPNVKRVISVLRRLINELISEYGKIDRIIIETARELNSKKDEEKIKKSQEQSNKDKKEAEALLKNMNKEISSKNILKVRLLKEQKSRCLYSGENLTLEDALDENITEIEHFIPRSKIWIDSQKNKILVLKKYNQNKSNQHPITFLKSIGEWENFVGRVNEYILNKDKKIWLTDEKNIERIYNDEKLEDRFLNDTRSATKIVANYLEHYLFPKQNEHGKGEVNNNVIRVTGKAISELKKLWGIHEAQPTNEDGKKDRNTNYHHTIDAIVISLLNNSSKKALNDFFKQKEDKFKTKAILENLKNRFPISKNGKSLFEFVKDKVEKYEKNELYVCPFMKKRENIRGFKDGNIKLIWDEEVNNFVQIDKIEISKNLLLNDFGRDLKDEEIKKEFEKIKDKLNLPKQNNIKIALEEYEKRLLEIRANINNINKEIKQEQSKLPRDKKAIETVEILELKQKIEKLKQTQKELVKELEIPCYFLTKDGKKQIVRNLSLKSNSVTKADSIIITDKKQKNRVQRLTKEVYENLKSSKIPFVVKLNDNTFSVDLYNTSKGQLIGLNYFSSIKNDIEPKIDEKKKDLITDFEDKITISKNNILEIIDLKNSKKEYFVFNGGGNISAGNNKIELKSINKKEDKRLFITLNNNIIVKLIKINFFGEIFYEGFKKN

SEQ ID NO: 8575 - protein, 1168 aa, synthetic construct
  REGION 1..1168: note = Synthetic
MKKVLGLDIGTNSIGFSLNEIEIKNEQTIFNELTSNSIIFSEYIKAEDRRKFRSGRRRNERNSRRKQIVRKLLFDFNLANNIIITQPIKYFNKLSQKQNPYILRELAVNGKSLSKDEFTFALYTIISRRGYSNQFKTEESKDDGAITEPIKKNKTIYLENKLTIPSLVLLNKKIELEKDAFINVAIRNKKDDYTNSIGRELWKEELEKLLHSQKNNIELFENSEKYETFKNKLLYGVNENSLGQFEQRPLKSMEDMVGYCSFYNLYHQNSQKRVAKSHISSIEFTLRQRIENSILGNLIFNDKTGEMFTPSKEEIENTIELWLKKPPTQTINTKNVFDKAGLKNIKIKTTDKQDDTILDIKLHTQLLEIFKTVNIDIFEKHRDLYTKILEKIHYFVNKDQIVKEIKKADIQNILSDETIERLSKVDKGTKESYSSFSLLFIDEILQKLRDGKTYQDSLTQLGYFRKYLDITPYDYLPPLNPSKEDIKWLEKNIKNFKVEHLFYQPLVSPNVKRVISILRRLINDLIKKYGKIDQIIIETARELNSKTEEDNIKESQANSRKEIKEAEKLLEANKYEVTNKNIERARLFIEQKARCLYSGNSMTLEEALDESQTEVEHFIPRSKIWINLYKNKILVFKKYNQNKSDKHPITYLKSKNAWEDFQHRVNENLSNKSKINWLTNEDNINNIWNNEKLEDRFLNDTRSATKIIANYLEHYLYPKQNEHGKGETNDKLIRVTGKAINELKRLWGVNKVQPKNEDDKKDRTTNYHHTIDAIVISLLNSSAKKALNDFFKQNENGFKTKAILENLSTRFPKTKEGISLVDFVKEKVKKYENDELYICPMMKKRDNIVGFKDGNIKLYWDEEKKIFCQIDKKPIDKNLLFDQNGKDVNDSEVKKRVDDLIKSLDLPKQNNIKVAIINYKEKLLNTREKIKSLEEQIKELKGNLPNKKDYIDTPETIDIKEKMKLLTDEKQTQIDIQNEPCFFLTNKGQKQIIRNIKIKTKEASKVDSIIITDKTQTSRVKRLTKDIYEKLKSTQTPFVAKLNDTTLNVDLYNTQKGQVIGLNYFSSIKNDISPKIYETKISLIKDFEDKITISKGDLLEIENLKENRKKYYVFNGGGNISSGKNQIELKSINKKDEKRLFITLNKDTIAKKVFINYQGDISYEEFKK

SEQ ID NO: 8576 - protein, 1170 aa, synthetic construct
  REGION 1..1170: note = Synthetic
MKKILGLDLGTNSIGFALNQVEEKDGAIVFEELTSNSIIFSEYVMATDRRAFRSGRRRNERAGRRKENIRKLFCYFNLASKDILDNPINYFNNLTKLYKEPYHLREEAIKGKELSKDEFVYALYTIVTRRGYTNLFAKEEDDKEAKESERINSAILTNKNLYKSNNYILPSKVLTVKKDKLVKDGFINIAIRNKKNDYSNSLDRKLWQEETELLLESQKNNKELFESLKTYEDFKNKLLNGINENSMGAFEQRDLKSVEDMVGYCSFYNFYSNDPQKRVINAHIKAIEFVLRQRIENSILGNLIINKKTGEFVQLSKEDIESTIDFWLKTPNVQTITAKNIFKNAGFKDVEIKISDKQDDTVQDISVHKSILEIIDFETIFKNEEFYTKILEVLHYYVGTNQIKDEIKKLNKENILNDEQIEKISNLNKAKSSYLSFSLKFINQILDKMKKGTLYHTALEELGYFKRYTKMEAYDYLPPLNPSKEDIKWLEKNIKNFKADELFYQPLVSPNVKRVISILRRLVNELISRYGKIDKIIIETARELNSKKDEEKIKKSQEQSKKEIKDAQTLLKSENKELNGKNTLRARLLKEQKAKCLYSGETLTLEDALDENITEVEHFIPRSRIWIDSYKNKILVLKKYNQNKSNQHPVSFLKSIGEWENFIGRIDEFLSNKDKKYWLTNEENIQRIWDNEKLEDRFLNDTRSTTKIVANYLEHYLFPKQNEYGKGETNDNVIRVTGKAINELKRLWGIHEAQPTDDDGKKDRDTNYHHTIDAIVISLLNNSSKKALNDFFKQKENKFKTKAILENLKTKFPVTKDGKPLFEFVKNKVEKYENNELYVCPYMKKRENIRGFKDGNIKLLWDEELNNFAQINKIEISKNLLYDNFGKELKDEEVSKRFNDIKERLNLPKQNNIKEALEEYEQRLLKTKESINNIVVDIKNEQSKLPRDKKAIDTAEILEIKSKIEKLEQNKKELIKELEIPCFFYTKDGKKQIVRNLKLKSSSVTKADSIIITDKKQKNRVQRLDFEVYQNLKENKTPFVAKLNDNTLSVDLYNTQKGQVIGLNYFSSIKNDILPKIDEGKIKLISNYDDKITISKNDIIEINDFKNGTKNYYTCNGGGEIGKGKNVIKVDNINKKNKSVIPIQIANYRIVRKVNINFFGEIFYEEFKKS

SEQ ID NO: 8577 - protein, 1161 aa, synthetic construct
  REGION 1..1161: note = Synthetic
MNIISKKVLGLRITINSIGFYLNKIFIENEQTIFEEIASNSIIFSEYIKAADRKSFRSGRRRNERNSRRKEIVRKLLCDFNFANKSIITQPIEYFNNLSKNQNPYILKQSAVQGKSLTKDEFTFALYTTISRRGYSNQFNTKDTKNDGVINGAISKNKAIYLENNLAIPSLVLWNKKIELENDGFINVSIRNKKDNYNNSLDRELWQEELEKLLESQKNNSELFEDKEKYETFKNKLLHGVNENSLGIFEQRPLKSMEDMVGYCSFYNAYHQNSQKRVAKAHISSIEFTLRQRIENSILGNLIFNDKTGDIFTPTKKDIENTIEFWLKNTLTQTINTRNIFDKAGLKNIKIKIADKQDDTILDIKLHTQLLEIFRNANIDIFEKHKALYTKILEKIHYFVNKEQIVKEIKKVDIENILDDVTVEKLSNVNKGNKGFYASFSLFFIDEILQKLRAGESYQNSLTQLGYFKKYLDITPYDYLPPLNPSSDDIKWLEKNVKNFKVEHLFYQPLISPNVKRVISILRKLINDLIKKYGKIDEIIIETARELNTKTEEEQIKDSQANSRKEIKEAEKLLEAYKYESTNKNIERTILYIEQRAKCLYSGNPMTLEEALDEIQTEVEHFIPRSKIWINLNKNKILVFKKHNQNKIDKHPIIYLKSKTAWEDFQHRVNEHISNKSKVFWLTNEDNINKNWEKGNLEYKFLNDNKSASKIIANYLEHYLFPKQNKHGKGWETNSNIIRVTGKAISELKRLWGIDKIQPKNEDDKKDRDTNYHHTIDALVISLLNQSSKKALNDFFKQNENGFKTKAILENLSARFPKTKDGISLVDFVKEKVRKYENDEIYICPMMKKRDNIVGFKDGNIKLYFDKGKDIFCQIDKKPIDKNLLFDQNGKDVSDSEVEKRVEELINLLELPKQNNIKEAILNYKEKLLITRKSIKDLEQQIKDIKGNLPNKKDCVETPETEKIKEQIEELEKKKNIQKNIKNEPCYFTTNKGQKQIVKNIKVKSKDASKVDSVIITDKTKTNRVQRLTKDIYDDLKSNQTPFVAKLNDTTLNVDLYNTSKGQVIGLNYFSSIKNNIPSKINESKIELIKDSKDKITIQKGDLLEIENLKDNSKKYFIFNGGGNIAGGNNKIEVKSINKKDEKRLFITLNKDTVAKKVFID

SEQ ID NO: 8578 - protein, 1001 aa, synthetic construct
  REGION 1..1001: note = Synthetic
LASKERRKWILGIDGGTNSLGWAAVGRNERSQPSDIIRAGVQIFADPLVDKGEPSARERSAARRMRRLVGRRQARRDELRTKLRALGLLPDTHDNELSSRGLEFRAKLIDETAEEVAGGRFNPGWVVGYALCSLNVRRGFKSTRKERSAGAGKSKSNDDAGKVLEAIKSTREVRGGLTHGQHLYQRLLDEKTTRSRPGSDGYNETFPNRDDIASEFDQIMEAVKSEFKNITDDDIAAMRSLILDQRQGVAPPRGICSFMPAEQRGYKASPIIERFRMMQEVGNISWIDSMGEVQRMVEYVDVRDELISHLRTKKSMTVGALGKFIDKRVPDFVELNTGDIRDKFVGCLTDIEMIKAIDDRWPQMPLEKQDAMVELLLSLASDESVLDRLQNEFGLSHNEAGAVLDVKLVRGTASVSNQAALLLVGQMERGLDFTQAVNALVSERNDFTDGLPVVRGLKKRLPNYEVHFAGTSHVDAITGRFTNPTLDRFFRILRTVVNRLIREHGRPDEAVVELVREIAQGEVKRKEHSKRQKAAQKENERRAKKLEEEGVAVTRENLRLLRLWEDQNEECIYTGKIIARTELFDGSCDIDHIVPRIKSSTDNRLLNVVLCTAGANRYKRDRTPHEAYGQSLDGYDWGAITERIKWLRKERKISREKVERFGEDARKLYDPENGLPIRLLTETAYIAKLMRAYLSSIIPAEHIHAIAGNVTAKQRKEWGLNNIVGTSEEDGKKARDDHRHHAVDAITIACCTPASLAKCAATDSTPWPTIRCDVKVVVDNIIAVHRVDRHEEGTLHEDTFYSMKHDRPASRNVASWFTAEKTSEKCRARIEKVVDLGLRSSMLRIFDNAGIDDKAVLQEWLAHPKRRIRGIRTFQDSRGQPVEIGRSHPRWVFTGGNWAVEVRGVDGGNWIAKVVDRLTANASNRAGVDGRLVMRLHRNDLVWLGDKIMRIKEISGGQEPLIRLADPNLIDGRPVTVTLSVLKKRGVRLAKPSPLGTFPQE

SEQ ID NO: 8579 - protein, 1108 aa, synthetic construct
  REGION 1..1108: note = Synthetic
LTAKTNIHYRVGADVGLNSLGFSAIQLDTNGNPTALLKTLSYIHDGGVDPTQNKSGTTRKAVAGIARRTRNMRKRRSHRLSQLDRQLYQLGYPVDEVPETEHGLYEYWNVRSALATAYVPDKDRRDRMMVMAVRHIARHRGWRNSYSRVETLFEDVEPSDQYKDLKQRVETRLGVKLDDDMTPAQLVALTLNERDKNFMRVRTSTKYGEGILPNRLMQSDNARELRRIFTVQQIPEDVWKPILRTVFHCASPKGSAEKHVGTDPLDQTQKRALKASIAFQKYRILNVITNLRIRRKSEASRPLTVSEKQDVYELLTTAKEDVEWLDVCAVLDIERNELKGVGTLTHDGEERIGNKPPVLDTVIRLHGIKNTKLRKMMDAWWNAATEDEQAAMIRLLSNTVDLDKVRDLIEYASPIEFIDGLDEDLLTPLDSISLPVGRAAYSEKTLDRLSKRMLETEDDLHYAIRHEFDVPADWKPPVPPVQEPTGNPAVDRVLKAFNRFLSQCEQEYGIPESIAIETTKESFSSVAFGRTLDYERRQRRDKDNQTRAAIREDMRKQLSNGGSFKVHDYDIRRWEIVQSQNNTCLYCGATSPRFSFDKSELDHIVPRRGVGSDSKRTNMAAVCPECNASKSNVPFAVWVHSDYAKAHGITMNDVIARVNQLMFPPSMNRKQVGQVKKSIISRLKQTEQDEPLDNRSIESVGWMADELHRRLDGRYSNKTVKVFTFPGSITYEARRASGIDGQIHFIGAQWKTRLDRRHHAVDASVIAMMNQSVALRLAERHYLRESQRLCGTPFGQADWKQYPNKNTPGYVRYQQWIEQMKSLLNLLNKGLNEDTIPVVRSRRLRLGNSTAHDATVKPLQYVRLGDALSPTLIDHAITPQVWKALTRLPDYNPQTGLPANPNRVITALGEVCHAKDEIGFLPGNNAQLYVNGGAADIGGTIHHARIYRCEQVLKNGKRKTFYGMVRVFQCDLMKRRKNTDLFRTPLHPADVSIRYADGKVRDAIRQGHATCIARLTINDEIQLTSEMMMDMCPEYANMFHTDSGVERRFIVAGFPSPIQFRLVPSVIAEEGLGKMVEQGLEVPAKVEKMFKLHTFVPVVNKIGHVLEQ

SEQ ID NO: 8580 - protein, 668 aa, synthetic construct
  REGION 1..668: note = Synthetic
MQSDNARELRRIFTVQQVPEDVWKPILRTVFHCASPKGSAEKHVGTDPLDSTQKRALKASIAFQKYRILNVITNLRIRRKGEEPRPLTVSEKQDVYELLTTAKEDVEWLDVCAVLDIERNELKGVGTLTHDGEERIGNKPPVLDTVIRLHGIKNTKLRKMMDAWWDVATEGERAAMIRLLSNTIDLDKVRDLIEYASPIEFIDGLDEDLLTPLDSISLPVGRAAYSEKTLTRLSKRMLETEDDLHYAIRHEFNVPADWKPPVPPVQEPTGNPAVDRVLKAFNRFLSQCEQQYGIPESVSIETTKESFSSIAFGRTLDYERRQRRDKDNQMRAAIREDMKKQLSNGGSFKVHDYDIRRWEIVQSQNNTCLYCGATSPRFSFDKSELDHIVPRRGVGSDSKRTNMAAVCPECNASKSNVPFAVWVRSDYAREHGITMNDVIARVNQLMFPPSMNRKQVGQVKKSIISRLKQTEQDEPLDNRSIDSVGWMADELHRRLDGRYANKTVKVSTFPGSITYEARRASGIDGQIHFIGAQWKTRLDRRHHAVDASVIAMMNQSVALRLAERHYLRESQRLCGTPFGQADWKQYPNKNTPGYVRYQQWIEQMKSLLHLLNKGLDEDTIPVVRSLRLRLGNSTAHDATVKPLQYVRLGDALSPTLIDHAITPQVWKR

SEQ ID NO: 8581 - protein, 711 aa, synthetic construct
  REGION 1..711: note = Synthetic
MLLGKFGYPVIEPESLDKPFEEWHVRAELATRYIEDDELRRESISIALRHMARHRGWRNPYRQVDSLISDNPYSKQYGELKEKAKAYNDDATAAEEESTPAQLVVAMLDAGYAEAPRLRWRTGSKKPDAEGYLPVRLMQEDNANELKQIFRVQRVPADEWKPLFRSVFYAVSPKGSAEQRVGQDPLAPEQARALKASLAFQEYRIANVITNLRIKDASAELRKLTVDEKQSIYDQLVSPSSEDITWSDLCDFLGFKRSQLKGVGSLTEDGEERISSRPPRLTSVQRIYESDNKIRKPLVAWWKSASDNEHEAMIRLLSNTVDIDKVREDVAYASAIEFIDGLDDDALTKLDSVDLPSGRAAYSVETLQKLTRQMLTTDDDLHEARKTLFNVTDSWRPPADPIGEPLGNPSVDRVLKNVNRYLMNCQQRWGNPVSVNIEHVRSSFSSVAFARKDKREYEKNNEKRSIFRSSLSEQLRADEQMEKVRESDLRRLEAIQRQNGQCLYCGRTITFRTCEMDHIVPRKGVGSTNTRTNFAAVCAECNRMKSNTPFAIWARSEDAQTRGVSLAEAKKRVTMFTFNPKSYAPREVKAFKQAVIARLQQTEDDAAIDNRSIESVAWMADELHRRIDWYFNAKQYVNSASIDDAEAETMKTTVSVFQGRVTASARRAAGIEEDTLYWPAIKDSSGSSSSCGGRFRYRDDEHGCCADVDGT

SEQ ID NO: 8582 - protein, 718 aa, synthetic construct
  REGION 1..718: note = Synthetic
VGADVGLNSLGFSAIQLDANGNPITLLKTLSYIHDGGVDPTQNKSGTTRKAMAGIARRTRNMRKRRRHRLDQLDRQLYQLGYPVDEVPDCEQDLYEDWNTRSALATTYIADKNKRDRMIVMAVRHIARHRGWRNSYSRVETLFEDVEPSDQYKDLKQRVETRLGVKLDEDMTPAQLVALTLSERNGKLVRLRTSTKYGEGILPNRLMQSDNARELRRIFTVQQVPKDVWKPILRTVFHCASPKGSAEKRVGTDPLDQTQKRALKASIAFQKYRILNVITNLRIRRKGEEPRPLTVGEKQNVYELLTTAKEDLEWLDVCAVLDIERNELKGVGTLTHDGEERIGNKPPVLDTVIRLHGIKNTKLRKMMDAWWNSSTEDEQAAMVRLLSNTVDLDKVRDLIEYASPIEFIDGLDEDLLTPLDSISLPVGRAAYSEKTLDRLPKRMLETEDDLHYAIRHEFNVPADWKPPVPPVQEPTGNPAVDRVLKAFNRFLSQCEQQYGIPESIAIETTKESFSSIAFGRTLDYERRQRRDKDNQTRAAIREDMRKQLSNGGSFKVHDYDIRRWEIVQSQNNTCLYCGATSPRFSFDKSELDHIVPRRGVGSDSKRTNMAAVCPECNASKSNVPFAVWVHSDYAKAHGITMNDVIARVNQLMFPPSMNRKQVGQVKKSIISRLKQTEQELIAAKGLRQAVSEITSIPATDPVIEEIAAATAEVEKRIR

SEQ ID NO: 8583 - protein, 644 aa, synthetic construct
  REGION 1..644: note = Synthetic
MQEDNANELKQIFRVQRVPADEWKPLFRSVFYAVSPKGSAEQRVGQDPLAPEQARALKASLAFQEYRIANVITNLRIKDASAELRKLTVDEKQSIYDQLVSPSSEDITWSDLCDFLGFKRSQLKGVGSLTEDGEERISSRPPRLTSVQRIYESDNKIRKPLVAWWKSASDNEHEAMIRLLSNTVDIDKVREDVAYASAIEFIDGLDDDALTKLDSVDLPSGRAAYSVETLQKLTRQMLTTDDDLHEARKTLFNVTDSWRPPADPIGEPLGNPSVDRVLKNVNRYLMNCQQRWGNPVSVNIEHVRSSFSSVAFARKDKREYEKNNEKRSIFRSSLSEQLRADEQMEKVRESDLRRLEAIQRQNGQCLYCGRTITFRTCEMDHIVPRKGVGSTNTRTNFAAVCAECNRMKSNTPFAIWARSEDAQTRGVSLAEAKKRVTMFTFNPKSYAPREVKAFKQAVIARLQQTEDDAAIDNRSIESVAWMADELHRRIDWYFNAKQYVNSASIDDAEAETMKTTVSVFQGRVTASARRAAGIEGKIHFIGQQSKTRLDRRHHAVDASVIAMMNTAAAQTLMERESLRESQRLIGLMPGERSWKEYPYEALHAMNRSIFGWIIWTFCLSCLMMRWTMIELLSCNRSVMSLVIP

SEQ ID NO: 8584 - protein, 1042 aa, synthetic construct
  REGION 1..1042: note = Synthetic
MVRKQTAAGQPAFDYILGLDLGASSIGWAVIKTSSGTPIGLARAGVRVFEAGLAGDLESGRAEPRNVKRRLARQARRQTDRRRRRLRRVYRILQRAGLLPAGESGDVIPALDGQLFEVHAAATKSEAERHRLAQVMPLWLRARALDHKLERQELGRALFHLAQRRGFLSNRKSAPKEDEDEGKLKHSISELAEEVTGSGARTLGEYLSRLDPEEARIRTRPTSRVMYESEFEAIWETQARYAPQLLTEALRIELREAIFYQRPLKSAAGLIGACELEPDRHRAPWALLDAQRFRLLQMANNTRLIDLETGEERPLAGSERERLVSALERQAQMTFPAAKKLLGFKPKQVRFNLEVGGEARFLGNRSAAAIAEIFGEQWWNMSQGQREAVVEDVLTIESEDALAHRGFHHWKLSRRAADALAVVRLQPGYCSFSRVALTKLLPHLEQGLSVAEACDLAYPDRRASAVPHDELARLEEALPSLRNPVVGRVLTELRKVVNAIVRAYGKPSVVRIELAREVKRSRRGREEAARRMRQQEQRRKVAAALLLQDAGIEHPTRDDIERVLLWQECGGQCPYTGKPISFGKLFGPHPEFDVEHILPFSRSFDNSFVNKTLCHAEENRRIKTNRTPYEAYHDTPRYDEILGRVRAFSGDKAREKLRRFQAAEIEGLDEFTSRELNDTRWASRLAADYLGTLFGGRVDANGTLRVQVSSGQLTSFLRGAWELNRVLSSNGAKSREDHRHHAIDAVTIALTAPGAVKALSDSSEKAWAQRRRLFSHLATPWPNFDPEVRDVIGGLNVSHRADRRVSGALHDETLYGIAPEKGAVVVRKPVHALTEREAHGIVDEAVRTAVQEKRRLLGDFKKLEQDPPTLISRAGKRVPIRRVRIRKHERVVRVGKGPRQRQVIEGSNHHIEIVAEVDAEGRETRWIGRVVSMLQASVRLASHPPVPVVDRTVGGEERFKFSLCRGDGVLLGDEENAKLWIVQKLSANQTGATTIVLKPPADARKVNEIPTQGRIHSPNTLRKAGARKVVVDPVGTVRDARD

SEQ ID NO: 8585 - protein, 1047 aa, synthetic construct
  REGION 1..1047: note = Synthetic
MGASPTSSLLLGLDLGTASVGWALFALGEGDSLERLVDCGVRIFEEGTEGDIEAGRDASRAVPRREARSRRRIIERKVMRKLHLQRTLARFGLLPEIPSLRPTERVTAFQALDKELSEDFYARHPGLMLPENGGRRLFPYHLRAMGLAERLEPHEFGRALYHLVQRRGFHSNSRRAPSDKDEGKVKDAIKALYKEMGDRHLGQYLAAIGGNAPAADGESCGERRVRGRWLHRDMLRAEFDALWAAQAAHRAPWATPEARGAVGKCIFWQRPLKSAKELVAFCELEKRARRAPRCTLEAQRFRMLSKLNNLEAVTPHGEVVKPDAAQRAVLVERLESKGDLSFADLRKLLNLPKGSEFNLERGGEKKMEGNRTAAKLRAALGAAWDALSPEDKDALVLLVYATNKPEVLSRVAAKRFALAPEAAAKLPEVRLEEDYAALSRRAMRRILPHLEAGAPYITAREMEYGKPAPPPCKDLLPPVAAALKGLRNPMVSRTLTELRRLVNSLVARHGKPARIRVELARDLKRSRMARQRISKDNRARQGNRDRLYDEILKAYPGLGQRKETVALKALLAEECTWRCPYCGGVFGNDDLFGPHASVDIEHILPYSRSLDNSFLNKTLAHNACNKAKGNRTPYEVWGEAATERYAAILDRVSGFKCDGWTREAKLKRFMVRDMSQEFAEFTARQLSDTRVASRLAVEYLGWLYGAEALQRVKVSSGGVTALVRDVLGLNHVLGRGEKSRADHRHHVVDAVAVACTDQGLIQRIASSAEWAETHAQRIARAPLSPPWSGFLEDVRARVLGVNVSLRPRRGVNGALHDQTFYSLKGGRVTVRKALEKLSATEVGQIVDPLIRSLVQAKLAELGIKEPVKAFSDGANPVCVERLGGTPVRRVRVLVKGTPERIGQGDRARLAMTGGNHHMAVFETVDRKGRPVWVGEVVTRFEAKRRAGRKEPVVRRERPDGGRFLFTLTSGDVVAIMEGSVETLWRVRTVTTDGGRPRIRMTPLQDARPEKEIYIDKNVRRPFVSQMGDGSYRKVTVTPLGEVRRDNT

SEQ ID NO: 8586 - protein, 1078 aa, synthetic construct
  REGION 1..1078: note = Synthetic
MESPISFSFDIGHASIGWAAIKEIDDAPDIIGCGAVTFRPDDCQNHTRAVFRRGRRHIAATRNRMKRLEKLLLDIGALSEADIELARRNPHPWPWLLAAKVLIGNYDQLNWLELWAVIRWYAHNRGYDGNVLWSGSLPDEDDKDDTQKVENANRLMQQFETSTMAETVCAFLGVDLSDNKAPALKAYFKGQDAAFPREVVQGEVIRILEAHIGKLPRCDAQLIECLCGQGRDSWKAVSCCGIRLPKRFHGGLLFGQMVPRFHNRIIPECRISGEKTPDKHCLDFYRYRWGMLLCNLRVSDVLTDSRKLFARERQAVHAIMEKDGYLTKKTLKKALEEATSSTPVNVDQMFVTPEMEKALVLDPVKRELSSQKLSGMWSTIPEQFQKRFAGQLFKRKPASLNRWRDVLIAGGESTEAFDEAVQATYDAYVKRSRKKARSLYQFKADRISIDCASGRAPYSRKHMQRAWEAVFDDQQPDPKDSGGCLEETAEIVGKQIQRSVDAQINNHLVRHRLLIFRRLLKDMVRTYAGGKAERVGQVSIEVIRDLQEFSAKTAKEKAQLMGLKLADHRRAVKEIEQELPNYGGKYKISAGLIKKVRIARDMNWTCPFTGKHYCFDDVVNGQVDKEHIIPRSWRPSDSLDSLVLTWPEVNRMKGQRTAWEFMVSDESKQVPGTNLQLQTLANYEKLVQKSLKPGRDPRGNAAQTFIDDDLRRWRRKLLLQLPDFDKRKKSDGDAGSGFTGRDLTQTSHLNKLAALQARDELKRAHSADILSLSGSVTAAVRKAWKLEGCLVQACPETENKTKTEIREITHLHHALDAVTIGLAAYYFPKDGKLWELMSRRQIRSAAEQQEFRQRAKQSVSFSSGGSWGIKDLPLKLKQQVANRLAERRVVQHQPKTMRGLKVQQNTWRVLGQDEKDSQKMVITIASRDENKKRQRSTKTEKKSKLLGLAPKNGDGKLAKLKGSLIVEENFGVILDPEMRVLPHLNVHYELERAKAANNGVQPRIIRGGSLIRIEEGRYKGTWKVFSIKDAKSGFLIDMASPEIVKLANKKRDCVINALLKTLLANKLTILSPDYTGTL

SEQ ID NO: 8587 - protein, 1075 aa, synthetic construct
  REGION 1..1075: note = Synthetic
MPKQVSFAFDIGHASIGWAAIKKNGAVPELLGCGVVTFRPDDCQNHQRAAFRRGRRHIAATRNRMKRLESLLLHLEVLSKIDIQNARENPHPWPWLLAAQILTGQRQALTWAELWAVIRWYAHNRGYDGNALWSGEENEDDKEDTQKVENANRLMGLYQTSTMAETVCAFLGVDPANTKNPSLESYFKGQDAAFPRSVVRAEVVRILEVHFEKLPRCDKAFVEALCGAERDSWKRIPCPSIRLPKRFHGGLLFGQMVPRFDNRIIPLCRISGEKTPDKNCRDFYRFRWGMLLCNLRVSDDETESRRLNAAERQLVHQAIQINGYLTPTGLKTAIEKATGATPINVDQMFMTPEMEKALVLDPVRREISSQKISPIWETIPERFQKRFAGRLFKNRRASLAQWREDLAEGGVELSAFDQSVEYSYEAYAKRKKKQKLDLPEFCSERISVASASGRAPYSRTLMAEAWEAVFDDSKPDPKDRGGCLEESLEVVTRQIQRSIDEKTNNHLVRHRLLIFQELLKDLIKNYADDDSANVDIVALEVIRDLQEFSAKTAKEKAQLMGLKLADHRRAVKLIEKELEKYGGEYRISAGLIKKVRIATDLNWTCPFTGKHYCFDDLVRGNVDREHIIPRSWRPSDALDALVLTWPEVNRLKGQRTAWEFMEQQNGGQVPGTDLRLQPLANYEKFVDSLKPRFDPRKGQRDFIDDDLRKYRRKMLLRVKHFDKRKKPEGEAGGFTGRDLTQTSHLNKLAVLQARDILDRPYDDTVWSLAGSVTAAVRKAWKLEGCLARACPETEGKTKTDIREITHLHHALDAVTIGLAAFYFPKNGKLWDLMSRRQISRKEDQTEFESLSRLPIRFTKNGKWEVPEVRPKLKNQISERLLEKRVIQHQPKTMRGLKVQQNTWRVLHEDPQDENKMVITIANRDENKKRKRSTKTERKSKLLGLRPKGEQGKLAKLKGSLIIEENYGVILDPEIRVLPHLNVFEEIANARKTNGGVNPRVIRGGSLIKVEKGRYEGVWKVFSIKDAKAGFLIDMASPEIVKAANKVRGCVMNARLNSLLKGRLTILEPDYTGHFE

SEQ ID NO: 8588 - protein, 1087 aa, synthetic construct
  REGION 1..1087: note = Synthetic
MNPVSFAFDIGHASLGWAAIEETGAMPQILGCGAVIFSPDDCQNHARAAFRRNRRNIAATRNRIKRLGRLLVHVGAFTEAQLRERMDQGRGHAFPWLLAAQVIRGYRQSLSWPELWDVIRWYAHNRGYDGNALWALAKTDKEQDEDSKKEENANRLMAQHGAMTMAETVCAFLGVDPVSKRAPALEAYFKGNDAAFPRRVVRDEVVRILRAHIGKLDGCDEAFVTCLCGDAENAWKAVDCPSIRLPGRFHGGLLFGQMVPRFDNRIIPLCRISAEKVPAKHCREFYRYRWGMLLCNLRVKGKSGEDSRRLSAEERVHVHAAMEESGYLTKTSLKKALREITGAEPANADSLFLTPEMERALTFDPVKHAVSSGRVAPVWAVLPDRQRKRFAGWLYKGKPSSLKRWRENMAADGVDLSDFDDAINIAYEAYKKRARKNARDLDGFIDEAISIVAYRPSGRAPYTRDLMQKAWEAVFDAGQPDPKDKGGCLEEKPEVVAQQLQRSIDAQTNNSLVRHRLLIFRRLLRDLVRNYAGGEVTRVGKVTLEVIRDLQEFSAKTAKEKAQLLGLKLADHKRAVQVIEKELPKYGGRYTISAGLIKKVRIAQDLNWTCPFTGKHYCFDDIVTLQVDREHIIPRSWRPSDSLDSLVLTWPEVNRMKGQQIAWAFMAGHECEKVPGTDLQLQSLSNYERCVDKLRPGRDPRGNRNAVFIDDDLRRWRRKQLLLMPEFDARRKKNSQQEGDSGFTGRDLTQTSHLNKLAALQARDELTERSDKLGPRIPQVVMLAGSVTAAVRKAWNLSGCLARVSPETEGQNKTAIREITHLHHGLDAVTLGLAAYFFPRDGRLWELMSRRRIGSDAERDEFKKRLGQFVTFSAGGNWEISDLPVELKNQIAECLMERRVVQHIPKTMRGLKVQQNTWRVLHQDPDDPEKMVLGMAMRDADKKRQPKTSREKKSKLHGLSPRDGTGKLARLKGSLIVEENYGIILDPEPAILTHSLVWKTLREVREKLGYMPRILRNGNAITVPAGRFCGTWRIRSIKDDSKKGLLVDLSFPDIVRMQSKGGGIKRDVRLSSLIKDKFTICQLDYSG

SEQ ID NO: 8589 - protein, 1089 aa, synthetic construct
  REGION 1..1089: note = Synthetic
MAKILGLDIGTNSVGWALIDDTNQTIINSGVRIFSEGVQEINTEKEASKNALRRMARQVRRQIERKMRRRNTLLNALIDLHLLPENDKQRKSCWYRNPYDLRKKALSSQLTLHEFGRALYHLNKRRGFKSNRKSDSTSPDTDQDTGVVINGITTLKNEIQASGARTMGEYFASLNPHEKRIRNRYASRDLYKEEFELLWTEQKKYHANILTDNAKERIHKIIFNQRPLRSQRSAIGFCTFEQSADGKMGKRRAAMSSLLAQECRMLQTVNNLRILGGKRQTEEQQILTEDEREKLIRYLDANKVLEFVSYEDVLKNNKKRGTLRKTTWYDILGLSPEIEYKCNFDKVLGNKTKVEFIEKLGAEFIASQDEARLEEYHHVLRYADDNVWLMSYVQSKWDITPEQAEQFVKIRLEDGYSSLSTKALKKIVPFLREGYRYDQACEQAGYHHSYTQQAALQNSIGRISSVLPSLRNPIVMVALTQVRHVVNELIEYYGKPDCIRIELARQLKMPRDKRIAMENDNKKREKLYSGYRNELLKEFPQWTKITKQDIERYTLWKEQKEMCIYTGEQISVQRLFGHDIDIDHILPYSRTLDDSYMNKVVCVRNANATKGNSITYEAFGGNAEKYANILERTKGLPHPKAARFKIKDLRSRLGELPEYEGKIAPNEEIGGFIHRQLTDTAYIARETKKLMETILPRKDIQVSNGQATALIRHLWGLNSILHNTQESGTTPALKNREDHRHHAVDAMVIALTTPGMLRQLSTLHAQNKLFYASSKRTEDDTLLPWKGFRDHAQQSVAAILVSHKFSGKVRGKMHEETFYGKIFKPSAGASHQEQYVVRKSLSALTATQVLAIVDDKVRAIVLQRLQEWGVDTSKGKFTIPRKAFEAPLYMTASAGKVAPCIKSVRVGVPSNTMKLLKSRVQHHGETLPFAVYVEPGNNHHYSIFRSRKGKKDVQTGEIMSLVDAYGWIKAGNTPIRKIYTKDPSAEFLYSLQKNEMFLWGVHPDTLEFEVGKKHKIVKKELYPLLQRQLYRIQKISQGKIDFRLHLLSGSDDVEVESDSESNTYQMTKGPSLVQGCKVVISPAGFLRLT

SEQ ID NO: 8590 - protein, 1069 aa, synthetic construct
  REGION 1..1069: note = Synthetic
MSECVARRILGIDLGIASCGWGVIEVGEASGSIIASGVRCFDAPLIDKTGEPKSATRRTARGQRRIIRRRRQRMNAVRRLLAEFGVLTGRSPDALHQALLRISQSVAGSQVTPWTLRAAAHERKLTNDELAVVLGHIARHRGFRSNSKNDGGANAADETSKMKKAMETTREGLARYHSFGAMIASDPKFADRKRNRDKDYSHTAKRSDLEDEVRTIFRSQTRFGSLVASEKLSQAFADAAFFQRPLQDSEDMVGSCPFEPGQKRTARRAPSFELFRFLSRLANLKLTVGRAPERRLTPDEIALAAKGFGETKKSITFKSLREALDLDPNARFSGVAKEKESTLDVAARTGGAAYGTKTLKDALGDAPWRSLSRVPEKLDRIAEILSFREDMKAIRNGLEEIGLDGLVVDALMQATANGDFKDFTRAAHISALAARNIIPGLREGLVYSDACTRVGYDHAARLAVPLSQIGSPVTRKALSEALKQVRAVVREYGPIDYFHIELARSVGKSAEERKKLTDGIEARNVEKEKRRKEAAEHLGRAPSDDELLRYELAKEQNFKCIYSGDPIDPAGISANDTRYQVDHILPWSRFGDDSYVNKTLCTARSNQNKRGRTPFEWFDADKTEAEWMEYSARVEDLKEVKGRKKRNYSIKDAASVEDKFKARNLTDTQWATRLLADELKRMFPPRECERVVTVRADGGNDGLSIVEERRVFTRPGAITSKLRRAWGLEGLKKQDGKRIEDDRHHAVDALVLAATTESLMNRLTVEVQKREREGRPDDIFHCSQPWPGFRADVQRTVYGSETMPGVLVSRAERRRARGKAHDATVRQVRGDDGKKRFNTQPHEIAGGKIVYERKDVFDKNFKESDLEKIPYPEPYGKVADPKKMRDEMVENLREWIRKGKPKDNPPRSMRGDVIRKVRIATDKKVAFELNGGTVDRGNMARVDVFRKKNKKGAWEFYVTPIYPHQIVSLERPPNLAVKGGGGEESDWYPLGGEAEFLWSLHAMSLVELVNSGGEVIEGYFRSLDRNTAAITVSPQTTNAIIRKGIGVKTLSSFRKFTIDRLGRKFEIQR

SEQ ID NO: 8591 - protein, 1066 aa, synthetic construct
  REGION 1..1066: note = Synthetic
MSERVVRRILGIDLGIASCGWGVVDISGAGGGIIATGVRCFDAPLIDKTGEPKSATRRTARGQRRIVRRRRQRMNGVRRLLCEFGLLPDPRPDALNQAMRRISTASAAAQVTPWTLRAAAHQRLLSNEELAVVLGHIARHRGFRSNAKNEAGANAADETSKMKKAMEATREGLAKYHAFGDMIANDPKFANRKRNRDKDYSHTAKRSDLEDEVRAILRAQLRFGSAAATETLAQTFADVAFFQRPLQDSEDRVGDCPFEPGQKRAARRAPSFELFRFLSRLANLKLAVGRSPERRLTAEEIALAAKGFGETKKTITFKSLREALDLDPNARFSGIGKDKEASLDVVARTGGAAYGTKTLKDALGDAPWRSLSRTPETLDRIAEILSFREDITSIRNGLEDLGLDSLVVEALMQAAANGDFKEFTRAGHISARAARNIIPGLREGLVYSEACARVGYDHAARLSVPLDQVGSPVTRKALSEALKQVRAVAREYGPIDYFHIELARSVGKSAEERKQLTDGIEARNVEKAKRRKQAEEHLGRAPSDDELLRYELAKEQNFKCIYSGDAIDPAGVAANDTRYQVDHILPWSRFGDDSYLNKTLCTARSNQNKRGRTPFEWFEADKTDVEWMEYVARVENLQEVKGRKKRNYSIKDAAAIEDKFKARNLTDTQWATRLLADELSRMFPPRECERAICGRADGGNDGLTIVEERRVFTRPGAITSKLRRAWGLEGLKKQDGKRVEDDRHHAVDALVLAATTESLLQRLTVEVQRREREGRPDDIFHCAEPWRGFRADVRRTVYGSETMPGIFVSRAERRRARGKAHDATIKQIREIEGERLVFERKPVEKLTDKDLEKIPIPKPYGQVSDPKRLRDELVESLRAWIAAGKPKDRPPLSPKGDVIRKVRIQTNDKVSVEINGGTVDRGDMARVDVFRKKNKKAVWEYYVVPIYPHQIVALNDPPDRAVIAYAEDKDWKEIDSSYEFLWSLFGLSYVEISKANGECIDGYFRGLHRGTGAASVCKHISLGKDATVSGIGLKTLASFKKFTIDRLGRKFEIPREVRTWRGEACT

SEQ ID NO: 8592 - protein, 1063 aa, synthetic construct
  REGION 1..1063: note = Synthetic
MISKQLLGSKMDICENLTLGIDLGIASCGWALIDQDDMNPGRIVAMGSRTWDAPETDKDRRPTNQLRRGHRSMRRVLNRRRQRMSEIRRLFHKQGLIEVQGPTGLRIAKLDPWNLRAEGLDRKLTGRELAVALGHIAKHRGFKSNRKGERGANSSDDSSKMLKAINETRDRLAQYRTVGEMFACDDAYRDRKRNRDSQFTHSVLRDDQVREVALLMDAQRRMGNSLASNDLEAAFCQVAFFQRPLQDSEHLIGACAFEPNEKRCAKRAPSFERFRLLCRLRALSISDGHEERPLTADQIAIAEAEFGLQKSYTFKRLRERLELSDGLSFSGVAKSEEGRDFVGRASNAAEGTASLRGVIVDSAGEVAWQSLQSKPEALDRIASIISFREDINSIQKGLTELCLDQSLVDALMAAVEDGRPFKAFSGAAHISAKAARAMLPYLRQGLTYDKAAAEAGYIHTDRVGPGRAEGTQHERMVHDIKWVDANVANPVARKAVIEALKQVYAIVGLYGLPGAIHVELAREVGKSREEREEIKSGIDKRNAEKERLRAQFKETCGQNPSRPEDLLRFELWTEQNGRCLYSDQAIAPHQILASDNSVQIDHILPWSRSGDDSFVNKTLCFTHANQNKRGLTPFEWFGADAERWETYRGVIESIKSMKGRKKRNYLLKDASILTEKFRPRNLNDTKYATRLVLDLLARLYPESERFTGLPRRPEEARRKRRLFARPGPLTDRLRRAWGLQGLKKSADGKRIADDRHHALDALIVAVTSERRLNELTRFVQDRENAGLSRDFGAIEPPWPGFREEAETRLREVFVSRAERHRARGEAHLQTVRGFEHETQGPVVYERKSVDLLSEADLDRVKDPDRNAALIESLREWIRDKKPKDRRPLSPKGDPIAKVRLRTTKKVDVLVRDGVAERGEMVRVDVFRKQSKRGAWEYYLVPIYPHQVFDPKDWPTPPNQAIRANKPESEWSQMDESYEFAWSAYPFSFLEVEKSDGTFIDGYLRGVDRSTGAIGLSPHYSRDETIRGIGAKTLKSINKFNVDRLGFRNQVLREKRTWRGAVCT

SEQ ID NO: 8593 - protein, 1060 aa, synthetic construct
  REGION 1..1060: note = Synthetic
VHDNVNNKISGSVWFLLTGGEMSARGYRRILGIDLGIASCGWGVIEVGENDGNIIAAGVRCFDAPLIDKTGEPKSADRRKARGQRRIIRRRRQRMNLIRRLLVEFRVLPDHTPEALHHALRRIPPTAAGSQVTPWTLRAAAHMRLLTNDEFAVVLGHIARHRGFRSNSKKEAGANAADETSKMKKAMEATREGLAQYHSFGDMIANDPKFADRKRNRDKDYSHTAKRSDLEDEVRAIFRAQRRLGSSAATEQFERSFAGAAFFQRPLQDSEDVVGECPFEPGEKRTARCSPSFEIFRFLSRLVNLRLTVGRVERMLTPDEIAIAAKHFGEQKSITFKTLRKRLDLDPNVRFAGIAPDKEGVDVAARMGGAAFGTCVLRNVLGDAPWQSLLRSPEKLDRVAEILSFREDVDSIRRGLDEVGLDAPIVDRLTQAVADGDFRDFSKAAHISSLAARNIIPGLRQGMVFSEACARVGYDHTARPSVSLEQIGSPVTRKAFSEAIKQVRAVTREYGPIDIIHIELARSVGKSAEERKAISEGIEQRNVEKERRRKEAQELLDRAPSDDELLRYELAKEQNFKCIYSGNPIDPGGIKANDTRYQVDHILPWSRFGDNSYINKTLCTTKANQDKRGRTPFEWFETEKTEQEWMEYVARVESLKEVKGRKKRNYCIKDAGNFEEKFKARNLTDTQWATRLLADELKRMFPAHEGERRVFTRPGSITSALRRAWGLEGLKKEAGKRVEDDRHHAVDALVLAATSESLLNRLTKEIQKRESEGRQDDIFHCSQPWPGFRLGVEETVYGSAGIFVSRAERRRARGKAHDATIRQIREIDGETALFERRPIEKLTEDDLDKIPVPEPYGKIADPRKLRDDLVENLRVWIASGKPKDKPPRSPKGDVVRKVRIRSTNKVAVELNGGAVDRGDMARVDVFRKKNKKGAFEFHVVPIYPHQIVTLESPPNRAVIGNKAESNWTLIDDNFEFVWSLNPMCYLKLTKSNGEMIEGYFRSMDRTTGAINLSPMETNSKTIRSIGVKTLSSFRKFVIDRLGRKFEIPGEVRTWRGEACI

SEQ ID NO: 8594 - protein, 1058 aa, synthetic construct
  REGION 1..1058: note = Synthetic
LPGRRTFSGKPLYRGFPTDSHFQGDKIRHLLSIFFFGNGLGESVKSLGIDLGIASCGWALIETDVAQGQIIACGARTFDAPETDKKRTPTNQLRRQFRGMRRVMRRRRQRMAQLRMLFQENGLLTDAKRDALRFPGLDPWQLRVAALDRRLTPEELAVTLGHIARHRGFRSNKKNQGNEAGDDGRVLKAAAANQEILSKYRSVAEMFDKDDRFARRKRNRDGEYTQSVNRIDLEHEARLIFSRQRALGSAHADAHLQEKFAELAFNQNPLADSEDKVGFCPFENKERRAAKRAYSFEVFRFLSRLNALRIGDARQERALTEAELAAAMEGFGSQRGMTFARLRKLIGLRDSEAFRDVPRDEEGGRDVVNRSAGNGCMQGSATLRAALGEHNWKTLLQRPEKLDEIAFIITFRATPESIEKGLFEAGLDPDMLHAIMAAVEKGAFASFTGAGHVSARACRAIIPGLQRGLVYSEACAAAGYDPTARPVTEISSINNPVAKRAIFEALKQVKAIIAKHGKPDRIHIEMARDVGKSKEERDKITSGIEKRNKERNTLRAAFNDTVGGEPSGPEDMLRFELWTEQKGRCLYTDQAIPPGAIRAKDNSVQVDHILPWSRFGDDSFINKTLCFAKANQEKKGRTPFEWLKDDPERWAKFVACVETNKGMKGRKKRNYLLRDASAAEEKFRSRNLNDTRYACRILMEHLAREYFEGTKHMVVGRPGALTDKLRRAWGLQDLKKVLEPDGEKRKHDDRHHALDAIIVAAITDSAVQRLTQAFKETEDRGSHRDFADFPPPWPGFIEDVRRHFREILVSRAERGRARGEAHAATISQLKQTDEGLVIYERKAVDKLTLKDLDRVKDPDRNAALIAALRAWIEAIKPKSTPPLSPKGDPIRKIRLITTDKPAVAVRGGNAERGEMVRVDVFRKANKRGAFEFFLVPIYPHQVADEKEWPAPPNRAARGATAEENWPEITAEHEFIFSIGPRTFLEVEKRDGTIIDGYFMGMDRANANIAISAHHSTKNITRSIGVLGLKRFEKFRIDRLGNRHAVPKETRTWHGAVCT

SEQ ID NO: 8595 - protein, 1050 aa, synthetic construct
  REGION 1..1050: note = Synthetic
LHTPTSKSIILRLRQNSACGRSGGAMSGQTELVLGIDLGIASCGWAVISRSDGVGVIVACGVRCWEAPEIPKTQEPKNQERRRNRGQRRVIRRRRQRMASLRRLFHEYRLLSNSEKTALRIVGLDPWSLRLEALDRVLSGQELAVALGHIARHRGFRSNSKRDRGANAASDTPKMLKALDATRERLSRYRTVGEMMAHDPAFAERKRNRDGDYSRSTLRADLEYEAGQIFAKQRAFGNELATENLEQAFRGIAFTQRPLADSWDKVGTCPFEPIERRTAKHAYSFELFRFLARLTSLRVGNGRNYRALTEAEIRRAANDFGNTKGMTFARLRKVCSIGEERFQGVPPADENNRDAIARSGSAAEGLVTLKNIVGNVAWLDLMRRTETLDRVAEILAFYESAESIRGELQKLTLEPLVLDAIMRGVADGAFAKFRGAGHISARAARNIIPHFSRGLTYDKACAEAGYRHTDRIETEITNPVARKALLEAEKQIRAIAQQYGTPDKIHIELARDIGKSAEERAEIERGIERRNKEKDKLRDIEFPETVGRPPQGREEFLRFELWKEQAGRCAYSDEIIHPSQISRSDNSVQVDHILPWSRFGDDSFHNRALCLARENQHKQDRTPFEWFAADKTENEWERFRARIETSKLLRGMKKRNYLLQNADEVEERFKTRNLNDTRYATRALMQRLESKYPAEPGRRRVFARPGTLTGKLRRAWAVNDLKKDPTTGKRSDDDRHHALDAIVVAATSESTLQALTRAFQEAEKRGLAREFGKFDPPWSTFLDDVRKAFDGIMVSRAERRRARGKAHDATIKQVREVDGKSVVYERKPVDKLTEADLERIPVPEPHERAADPAKLRDATVAALREWIRAGKPKDRPPRSPRGDVIRKIRVATTDKVAVEIREGTADRGDMVRVDVFAKSNAKGKRQFFLVPVYPHEVAMRETPPNRAVQGGGDDSNWPVVDETFEFLWSIYPMSLIEVTKSDGEVIKGYHRSLDRNTGALTVSAVNNSTSIKKGIGARTLLNFRKLTIDRLGREAEVPRERRTWRGKACT

SEQ ID NO: 8596 - protein, 1027 aa, synthetic construct
  REGION 1..1027: note = Synthetic
MTMRIFGIDGGIASIGWAVLDITDDTASIVAAGVRMFDAPETDKERTPTNAVRRLHRGQRRVIRRRRQRMAALRMMFQQHGLLTEAHRDALKQPGLDPWRLRAEGLERPLSGLEMAVVLGHIARHRGFRSNAKREAGANAADETSKMKKAIAATQERLGQWQTVGLMFARDPNYTDRKHNRGLNFDRSIQRSDHEDEVRTLFATQRRLGNALATEELQVAYADKAFSQLPLQDSEHLLAACPFEPDQKRTARRCYAFEKFRLLSRLATLRLTVRGQEQPPLSAEQISLAAADFGHQKSLSYRWLRKTLDLDTGVRFAGVAEKDEKNDFVARSGAAVEGTYALREVLGDAGWRVLMHNPVMRDRIGEVLTFREDPGSIRRGLEEAGVAGLILDALMDGVATGKFHAFTRAGHISAKAARALIPPLARGLVYSDACAEVGYDHAKRVEVKLEDVRNPVARKAVTEMLKQVRALVHEYGLPEFIHVELARDIGKGVEERDKITKGIEDRNKERDKARKRLEEDILGRPASLEELIRYELWKEQNGFCLYTGDYIEPGWIAAGDNRVQVDHILPWSRFGDDSFVNKTLCLARANQAKLGRTPYEWFEAEGLDWPLFAARVEGCKEMKGRKKGGFYLRKNAVEVEERFRNRNLGDTRYATRLLLDLLARMYPRDGQLHVLARPGQLTAKLRRAWGLDDLKKDAEGNRLEDDRHHALDAIVVAATSQSMLLRLTKAAQEAERQGAPRGFDFEHVPLPAGGFRDVVRDVVKDVFVSRAERRRARGEAHAATIKQVREIDGAQVVFERKAIERLTPADLDNIPIPEPYGNIGDPGKLRDETVAELRRWIEAGKPKDALPHSPKGDVIRKVRVANKDKVAVEVRGGTADRGDMARVDVFAKADRRGRKQYHVVPIYPHQIADRDAFPQPPDRAVIAFKLEADWTKVDPTFDFQFSLYQNSFVEVAKPDGEIIRGYFKGMDRQGAQIHLALHSSQRSLIRGIGSKTLLAFHKFAVDRLGRMSEIEHEKRTWHGEACT

SEQ ID NO: 8597 - protein, 1022 aa, synthetic construct
  REGION 1..1022: note = Synthetic
MNTGLVFGLDLGIGSCGWAALRLSGEEEGAVLGMGTRTFDVPETAKTRTPTNQLRRQHRGMRRVLNRRRQRMNDVRDLFQRAGLLPEAHKHALAVPGSDPWTLRHQGLDRPLVGWELAVALGHIAKHRGFQSNSKRDRGRNTPDDTSKMLGAIEETRSRLARWRSVAEMAAHDPEFSSRKRNRDGDYSRSLLRRDLVDEVRVLFQAQRRLGNTLATPALEEDFIGTAFFQRPLQDSEDKVGPCPFEAGERRTARHAPSFELFRLLSRLAALRVREGKAERPLTPAEVGMAVADFGSSRSLSFKRLRTLLELPASAGFDGVPVAEETKRDVVARSGEATPGAYVWRTKVLGETGWASLWHTPSTLDRLSEIITFREDMDRIASGIAELDLPPLIHDTILDAVKDGQFASFKGAGHISAKACRAMAPHLVQGMVYSAAAAAAGYTHTDRAEGDLDDIANPIARKAVTEALKQVRALVEEYGRPEYIHVELAREVGKSAEERDQISRGIEKRNNAKEKLRERFREDTGREPHGDDMLRYELWLEQGTFCVYSNQPIPLTALISGDNAIQVDHILPWSRFGDDSFVNKTLCYAKANQDKKGRTPHEWLVRDLRDDARWETLRRAVEGAKGMKGVKKRNYLLKDAEAVEQKFRTRNLSDTRYASRVLLHLLKQAYGQRGRDTILARPGPLTDRLRRAWGVQALKKRLDDGTRLDDDRHHALDALIVAATSQSALQRLTRAFQDAEVRGDHRDFYGFPPPWPGFIEEAKNHYTRIVVSRAERHRARGEAHGATIRQVVEEEEGAVVYERRAVADLTLKDLERLKDPERNGAIVEALRAWIDAGKPVDAPPRSPKGDMLGKVRLRTKKNVDVPVRGGAADRGEIARLDVFRKLNRRDAWEYYLVPVYPHQIFGPEGDAGPPMRAILANKDEGVWPIMDPAAGYEFLWSLNPFSWVEIEKADGTFIDGYYRSVDRSVAAIAVSPHQSKLAMTRGIGVKSLTTFRKFAVDRLGRRFEVTREVRTWRGGACT

SEQ ID NO: 8598 - protein, 1016 aa, synthetic construct
  REGION 1..1016: note = Synthetic
MEVFVDVSARQLGIDLGIGTCGWALLAEDSLIALGTRTFDVPETDKERIPTNQIRRQARGMRRVIDRRRQRMNAVRRLLADHGLLADGGKLGLATVRLDPWQARAEGLDRLLSAGELAVALGHIAKHRGFRSNSKRDRGANAPKESSAMLGAIAQTGERLQHWRTVGEMFWKDEFYQTRRRNRDGDYSRTVQRLDLETEVHRLLAAQRRLGNPLATFDLEQSFIDVAFFQRPLADSDDKVGPCPFEPSEKRAARHSPSFERFRLLSRLAALRLSSGAGERPLSDAEFAAACADFGRLQGFSFKRLRQHLKLDPSIRFAGIAPDEEGKRDVVARSGEATPGSAALRHCLGDTVWDNMLGTRPALLDAIAAILTFRDDADRIAEGLAGLGIEEPILDALMDGVRNGSFGKFKGPGHISAKACRALLPHLARGRVYSDACADAGYDHSRQTETNLDDIRNPVARKALGEALKQIKIIIHTHGRPTAIHVEMARDIGKSADERDEIKKGIDKRNSEKDRARQQFHEMVGTPAAGAEDLLRFELWKEQNGWCLYTGREIPIDALVSSDNRIQVDHILPWSRSGDDSYINKTLCFTEANQHKKGMTPWEWLHDDPERWEKFARTVEGCKTMKGRKKRNLLLRDSSRLEKEFRSRNLNDTRYACRLLLGILKHTYPDIVVAARPGPLTDRLRRAWGLQSLKKHEDGTRKDDDRHHALDAAVVAATSQSMLQRLTTLFQKAEREGGRRDFVGLEPPWPGFRADLEAKLEGVVVSRAERRRARGAGHKDTIRAIGEGDAGPVVYERKPVAALTEKDLDRVKDPERNKVLIENLRQWIAAGKPKDPDKAPRSPKGDPMTKVKLVTTDDVRILVRGGTADRGDMARVDVFRQADPKGRWRFFLVPVYPHQVFDPTDWPQPPNRAVVAYKPEKEWTVMGPDHEFLWSLYPFSWIAVEKADGTRIEGYFRGMHRSTGAISISPHHSKSLASTGIGAKTLASFRKFAMDRMGNLSEIEREVRTWHGVACT

SEQ ID NO: 8599 - protein, 1012 aa, synthetic construct
  REGION 1..1012: note = Synthetic
MLIFGIDAGIASIGWAVLTIDDNTAKIIACGTRMFDAPETDKERKPTNAIRREKRGMRRVFRRRRQRMNAIRKLLAESSLLPNADKSALALNLNPWPLRQQALDRRLTNPEFATILGHIARHRGFRSNAKSDRSANAADETSKMLKAIATTRDRLGQYRTIGEMFATDPAFTTTKRNRGGGFSHSILRDDQEAEIRKIFSTQRRLGNQVATESLEATFIEIAFSQRPLQDSDHLVGACPFIPTERRAARRAYSFELFRLLAKLNTITIETPAAPDRRLSRDEIANVANDFGAQKTITWKSLRKTLALPPTSRFAGIGPDDEKHDIVARTGAAAEGTYAIRQCLGDAGWKSLLTQPATLDHLAAILSFRADLTSITQAIASLPFEPILIETLCDAVHNGKFNNFSRAGHISATAARALIPHLATGLVYSEACSAAGFDHAARPEISLDDVRNPVARKAVTEIIKQVKVIAHEFGHPDRIHLELARDVGKSADERDEITRGIEKRNRERDKNRNELQELLHRDHVSPDDMLRYELWKEQNGRCLYTDREISPPDLLATANAVQIDHILPWSRFGDDSFNNKTLCLTSANADKRGRTPFEWFSADKTPHDWELFQARVESCKSMKNFKKRGHYLRRNAAEIEERFRARNLGDTRYATRLALDLLARKFYPGAQTRHVLARPGALTAKLRQGWGLESLKKSSDGQRQNDDRHHALDAIVVAACTESMLNRLTRAFQEAERRGLGRDFRALDQPWDGFRTDVQTAFAAITVSRAERHRARGEAHAATIKQVRERNGKPIVFDRKPVDKLTLADLANVKDPERNAAIIESLRAWIEQGKPKNSPPLSPKGDPISKIRLATKDKPAVLVRAGTADRGDMARIDVFVKPDAKNRPRFYLIPIYPHQIATLAAPPNQAVDNGKDEPDWTTIDASFHFKFSIYSNSLLEITKPDGEIICGYFKGLNRSVAAITLAEHQNPLAVKQGIGTRTLLSFRKFNIDRLGRIAEIKQETRTWHGVACT

SEQ ID NO: 8600 - protein, 1004 aa, synthetic construct
  REGION 1..1004: note = Synthetic
MGGNLYLGIDLGIASCGWALCTDDEIIGMGTRTFDAPETAKENTPTNQLRRQARGMRRVIDRRRQRMNDIRDLLHRHGLLDTDGKHALASCADAPWRARAEGLERKLTPHELALALGHMAKHRGFKSNSKRDRGNDPEAGKMLTAVAKTQERLEGRTIGQMFWQDPEFQARKRNRDGDYSRTVLRDDLISETRLLLRAQRRLGSTFASQELEDQFIGLAFTQGELRDSWDMVGKCPFEPTEMRAAKHAPSFERFRLLQRLAHLEVGGRRLGADDISAAMKDFGHQQGMTFKRLRKLLNLPPDQHFAGINADEEGKRDVATRTGGAMPGSHALYTALGEAGWQSLNKTPAILDEIAAVLAFRESDDSIRRHLQELGLEPLILTALLDGVTKGIFAKFKGAGHISAKAARAINPHLAQGMTYDKACEQVGYDHARRAEGDIDTIRNPIAKKALLEGMKQVNAVIEAHRRQYGIPTHIHVELAREVGKSQEERQEITAGIEKRNSRKDALRAQFRTDIGRDCANAEELLRFELWKEQNNRCLYSDTYITTEEVCDGSITQVDHILPLSRSSDDSYANKTLCRTKANQDKGSKTPFEWLGGDSATWDRLSLGVNGCLGMKGYKKRVYLLKDASILESRFVNRNLNDTRYACRLLLHALKGRYPSIKEQNIRARPGPLTDRLRRAWGIQGLKKDPNGKRIEDDRHHGLDALIIAYIDQSRLQRLTELFKKAEQEGSPREFAALEPPWDGFRRDAIQAWETITVSRAERRRARGAGHAATIRQVAERDGEKVVYERKSVEALTEKDLDRVKDAERNHRVIESLRTWIKAGKPKGSAPLDHQGQPIRKVRLATNKKVDVEVRDGAADRGEMARVDVFRKANKKGKWEYFLVPVYPHEVATLDAPPNRAIVANKAESEWTVIDDGFTFLWSLYPLSWVRAVKPDGVVIEGYYRGTDRSTGAVAISPHHTKTEMTRGIGVKTLAEFRKFAIDRLGNLTEIQQEKRTWHGEVCI

SEQ ID NO: 8601 - protein, 1027 aa, synthetic construct
  REGION 1..1027: note = Synthetic
MVSVRVLAVDLGIASCGWALINDAGENGGIVGWGVRIFDAPETPKERTPTNQLRRQYRGLRRVIRRRRQRMNEIRKLLAARAVLPNDGKQSLARLPFDPWSLRAAALDRRLDGPELAVVLGHIAKHRGFRSNSKRQSNAAAEDSKMLAAIEATQQRLTQYRTVGEMFAHDPAFAVRKRNRDGDYTRSILRADLEHEIRVIFERQRALGSTLADDCLHDAYTALAFTQRPLADSEDRIGFCPFEPDQRRAARRSYSFEMFRFLSRLTALRIGTGRTERALTAEEIARASDGFGTQRGMTFARLRNILELADADRFPDIPATDERKRDVVNRSSGNGCMQGSAALRTAIGDAAWKALLATPQKLDRIAFILSFRETADSIRAGLDALELPDGVAEAVMAGLDQGAFGDFAGAGHISAEACRAIIPGLRAGMVYSDACAAAGYDHAQRPATRIEDIANPVARKAISECLKQIRAVIREYGLPDRMHIELARDVGKSAEERDEIRRGIEKRNKERDRLRAAFRETVGQDPRDGTEDMLRFELWSEQPGRCLSTDRAIPPAAILAGDNSVQVDHILPWSRFGDDSFVNKTLCFAGANQEKRGRTPYEWLKDDSAAWEGFVARVETIKSMKGRKKRNYVLKDAASVEERFKSRNLNDTRYAARIVMEHLRRLYPADDRRYVFARPGALTDRLRRAWGVQDLKKVLESDREKRKADDRHHALDAAIVAATSESALNRLTRAFQEAEAAGSHRDFSGFAPPWPGFVEELREKFRNILVSRAERGRARGEAHAATIRQVLQEEDGAAVYERKAVLGLTAGDLARVKDPERNAALIESLRAWITAGKPKDAPPLSPKGDPIAKVRLRTNKKVDVPVRGGAADRGEMVRVDVFRRRNRRGEWEFYLVPVYPHQVADKAGWPAPPDRAVAAGKPEDQWPVMDDGCEFLWSLNQRSFIEVEQRDSTVITGYFMGLDRSTGAITVAAPHSTKELARNLGARTLRRFEKFRVDRLGRVFLVAQERRTWHGVACMLAAPRGSP

SEQ ID NO: 8602 - protein, 1054 aa, synthetic construct
  REGION 1..1054: note = Synthetic
LPWLSYRFPVATFPIIAFPVKRYRGQEEMIMRIFGIDGGIATIGWAVMSQTDEAMEIVAAGTRTFDAPETDKTRTPTNAVRRMHRGQRRVIRRRRQRMSELRVLLHGLGILPSAQRDVLAPKKGEAHRDPWALRAEGLERALTGAEFAAVLGHIARHRGFRSNAKREAGANANDETSKMKKGIAVTTERRAAYRSVGEMFASHPEYRERKHNRGLNFDRSILRGDQEDEIRTLFAAQRRLGNAAATDAFEAEYARIAFSQRPLQDSEHMVGPCLFEAGEKCAARRSYAFEMFRLLSRLAAIKLTTRGPDQFLTAEQIALATADFGKQKKLTWKWLRRTLDLASGVRFAGIAEKDEGNDFVARSGNAAEGTYTLRELLGDAGWRVLMHNPALRDRVAEVLTFREDPERIRLGLTEAGVERPVLDALMHGVETGAFSQFTKAGNISAKAARKLLPALAQRKVYSEACEDVGYNHATQAEVKLEDVRNPTARKAVTEYLKQVRAMIQTYGMPDFIHIELARDIGIGSEERDKITKGIEDRNKQRDKLRIELAELLLREPNLDDMIRYELWKEQNGFCLYTGDPIPFDVFAARDNRLQVDHILPWHRFGDDSFWNKTLCFAHANQAKKGRTPFEWFDEEGLNWDLYAERVERCKEMRGRKKGAFYLRKNAKEVEDTFRERNLNDTRYATRLLLGLLKQRYPGVEVRARPGQLTAKLRRAWGLDDLKKDADGKRLNDDRHHALDAIVVAATTQSMLQRLTTAAQDAIRLGKGRGFDFENLPPPAIGFREVVREVVENVFVSRAERHRARGEAHAATIKQVREVEGASVVFERKGVEKLTLADLDLIPVPAPYGKIGDPGKLRDELVETLRAWIEAGKPKSDPPLSPKGDAIRKVRVATKDKVAVTVRGGTADRGDMARVDVFAKANKRGKREFYLVPIYPHQVADRERWPAPPDRAVIAYKDDLEWTLIDRTFQFLFSLYGNSLIEASKPDGEVIFGYFKGLHRGTGAIAISPHENPRIVRGGIGAKTLLGLRKLSIDRLGKRTNIMNEVRTWHGEACI

SEQ ID NO: 8603 - protein, 1068 aa, synthetic construct
  REGION 1..1068: note = Synthetic
LPPGGEEPSSGKTTLPWLPSRLPQSCGARPRFLSSGLALAFLRGRDEMAERFLGVDLGIASCGWALIEQGGEAGRIVAWGARCFDAPETPKERRPLNALRRQFRGMRRVIRRRRQRMAAIRALFASHGLLPTTGCDALRGEGLDPWALRADGLDRALTPREFAVALGHIARHRGFRSNAKTRRNEEAETGRVKAGIERNRLGGGWRTLGEMFARDARYAGQKRNRDGEYTRSVLREDHEHEVRVLFARQRVLGNALATDGLEQAFAGLAFDQRDPDDSEHMVGFCGFERDQRRAARRSYSFELFRFLSRLTALRLRDGRDERALTPDEIARAEDGFGRQRGMTFARLRKALALPEAVRFADVPAGEEAKRDVVNRASSNGCAMGSHALREAVGEAAWRTLLGAPEQLDALAFVLSFREAASRVRAGVEALGLPDGVAEAVMEAFARGDLGEFAGAGHISAKACRAVIPGLRRGLVYSAACAAAGYDHAAQAETALADVANPVARRAIGEALRQVRAIVAAHGLPDRIHVELARDVGKSPEEREEIRRGIEKRNKELDRLRAAFRETVGRDPRGRDSGGREELLRFELWREQNGRCLYTDTAIPPDAIAAGDNRVQVDHILPWSRFNDDSFVNKTLCFASANQEKRRRTPHEWFGDDPRRWETFAAAVEGCRAMKGRKKRNYLLRAAAEMEAKFSSRNLNDTRYAARVVLQQLRRLYVEDGTVRVFSRPGQLTDRLRRAWGVQDLKKQMEPDGEKRRHDDRHHALDALICAATSQSALQRLTRAFQEAEERGSHRDFSAFPPPWPGFVAELREKFPHILVCRAERGRARGEAHGATIRRVVGTPDGPAVVERKRVADLTLADLDRVKDPERNAAVVAALRAWLDAGKPKDAPPLSPKGDAMRKVQLVTTKKVDVEVRGGAADRGEMVRVDVFRKRSPKGAWQFFLVPIYPHQVADREGWPEPPMRAVKGRLDEPEWPKLDAGHQFLWSLSQRSFVELVKPDGTEVGGYFMGLDRSTGAITLSAPHSTKALARSIGAQTLRSFRKFHVDRLGGRHEIERETRTWRGVACT

SEQ ID NO: 8604 - protein, 1041 aa, synthetic construct
  REGION 1..1041: note = Synthetic
MEIREDVSLGIDLGIGSCGWAVIRQSGNNGEIIALGVRTFDVPETDEKRTPTNQLRRQFRGMRRVLRRRRQRMNAIRGLFAKTGLIDEPGPDALAVGLDPWQLRADGLERALSPIELAVALGHIARHRGFRSNSKRDRGANASKDSSAMLEAIDATRDRLGRWRTVGEMFARDPYYAGRKRNRDGDYARSVLREDQEHEVRRILARQRQLGAFSDNAFEARFLDLAFSQRPLADSEDTVGACPFEPEEKRAAKRARSFELFRFLARLTALRVGGRPLTAEELTAAAAEFGGQRGMTFKRLRKTIGLDPGERFDGLPPDDEGRRDVVNRSSSNGCMQGTAVLRAALGDTAWRSLLMAPEKLDRIAFVLTFREDLGSIRAGLEDVGLDPVVLDSLMTAAVQGDFADFRGAGHVSARVCRAVIPHLLQGKTYDKAMRAAGYRHTDRERPILAGLSFHDSVKAQVAWAADRIANPVARKALTEALKQAAAIIHEYGLPGRIHVEVARDVGKSKDMRDEISRGIERRNRQKDRLREEYCETVGRQPAGADDLLRFELWKEQNGRCLYTDQPISPAALVASDNSVQVDHILPWSRSGDDSYLNKALCIASANQEKKGRTPFEWLGPDEARWAAFAAGVESNRALKGLKKRNYLLRDASVLETKFRPRNLNDTRYACRLLADALAAFYPADDTIEEPQGPHRNRRRVFTRPGALTDRLRRGWGLQRVKKDDAGKRIADDRHHALDALIVAATSESALQRFTRLFQDAEAKGSHRDFSRLDPPWPGFIQEAREKLAAVFVSRAERRRARGAAHAATVRQISDRDGVPVVYERKAIANLSDRDLDRIKDADRNARLVGSLRAWIAAGSPKDAPPLSPKGDPIRKVRVATGKKPDVLVRAGAADRGVMVRVDVFRKQTADGSQGFFLVPIYPHQVGDPAGWPAPPDRAVAGGRDEADWPVIDSTYAFLFAVYPLSFLELVKPDGEIVEGYFRSLDRSTGAMTISPDWTKAQIRKGIGTRTLASLRKFTVDRLGRRYEVRRETRTWRGAACI

SEQ ID NO: 8605 - protein, 1142 aa, synthetic construct
  REGION 1..1142: note = Synthetic
VPVLSHRVFKPRNATAARASPLAVTRGSRNFAGLSGGAAGVKAGAMVMGLSVAEAPGSGNRGVATGLSLKKRFPAASFPTAGSLFFMENHVTVVSLQTSQRYRSRLTTPGQVPDACHKGIGRMGVEMDQHKRFGIDLGIGSCGWAVASNPGEILGAGSWVFDVPETDKERTPTNQIRRGNRLLRRVTRRRRQRMTQLRQLFHEQGLLAHSRPDALKRAGLDPWELRARGLDKMLEPAEWAVVLGHIAKHRGFKSNSKSDLAGNAPPEGKAVLSALTENAERLAKYRTVGEMFARDPHYAARRRNREGDYSCSVKRDDQEHEVRKLFERQRALGNSRATDQFEEAYRKITFFQRPLQDSADRVGYCPFERQERRAAKHSYSFELFRLISKLNTLTLRDGKEERRLTSDEIKAAISDFGAQKSLTYKSLRKKLKLSDNVRFNRVSQDEEAYDVAARKGSCAAGTYALRKVVGEAGWAHLIATPHILDQIAWIITFYETIAKISSELKKLSLQPLIFDALMKGLEEGAFKTFTGAAHISDKAARNIIPHLLEGLVYSDACAKAGYNHAEQTEFAIEKLADLVNNPIARKAIHEGWKQIRALVNRYGLPGAIHIEMARDMGKSLEERREIETGIKKRTKQRDDLAAELAEHIGRPPRGEELLRYELWKEQNGKCLYTDANISPSQLVATDNSVQIDHILPWSRFGDDSFANKTLCTARANQEKRGRTPYEWFRDEKSDAEWMAFETRLERCLAMKNRKKNFYRLRNAEEAAEKFRNRNLNDTRYAMRVLMGLAKTLYPKDEGWRVRGRPGALTAALRKSWGIESLKKVNGERIPDDRHHALDAMVVAAISDSEIIKLTEQYKEAERRGEARQLGHVPEPWEGFREEVKAVYERTFVARGERRRARGEGHAATIRQVVNGENGEAKIYERRAIADLTAADLARIKDPERNAALIDSLRAWIDAGKPADKLPTSPKGDVIRKVRLLTNKKLDVPVRGGAADRGEMVRVDIFAKPNKRGKDEFYVVPIYRHEVADRANNPTPPNIAIPSGKPIDSSYRFCFSVYSFSYLEVVKSTGEIVEGYFRSFDRNTGAITLSLQNRPDQLIRSIGIKTLSTIKKFTVDRFGNRYEVKQETRTWHGAACTSPNPPD

SEQ ID NO: 8606 - protein, 1018 aa, synthetic construct
  REGION 1..1018: note = Synthetic
MLPVRVLAVDLGIASCGWALIEENGEDGRIFAWGVRTFDAPETAKERTPTNQLRRQHRGLRRVIRRRRQRMAAIRELLTTCGLLPNDAKTGLARPGLDPWQLRAVALDRRLDGDELAAVLVHIAKHRGFRSNSKRQTNAAAEDSKMLGAIEASRQHLIQYRSVGEMFAKNAAYVTRKRNRDGDYTRSILRADLEHEVRLIFERQRALGNTLADDSLHDAYAGLAFTQRPLADSEDRIGACPFEPEEKRGAKRGYSFEMFRFLSRLTALRIGTRHSERTLTVEEIARAAEGFGVQRGMTFARLRRILDVPDAERFADVPATEEGKRDVVNRSANNGCMQGSAALRTAIGDVAWKTLLGVPEKLDRIAVILSFRESAESIREGLDAIGLPDGVADAVMAGLDQGAFGDFAGAGHISARACRAIIPGLRNGMVYSEACAAAGYDHAQRPATRIEDIANPVARKALSEALKQLRAIIREYGLPNRIHVELARDVGKSAEERDEIRRGIEKRNKERDRLRDVFVETVGQAPRGAEDMLRFELWQEQSGRCLYTDRAIPPTAILAGDNSVQVDHILPWSRFGDDSFVNKTLCFAGANQEKRGRTPYEWLKDDTAAWEAFAARVETIRSMKGRKKRNYVLKDAASVEEKFRSRNLNDTRYAARTLIEYLARLYPADGTRHVFARPGALTDRLRRGWGLQDLKKVLESDGEKRRADDRHHALDALIVAATTESALNRLTRAFQQAEAAGSHRDFSGLEPPWPGFVEEVRTKFPAIMVSRAERGRARGEAHAATLRQVRQEEEGPAVYERKAVLALTEADLARVKDAERNAALVESLRAWIAAGKPKDAPPKSPKGDPIGKVRLLTNKKVDVEVRGGAADRGEMVRVDVFRKPNRRGEWEFYLVPIYPHQVANRERWPAPPDRAVTAHKPEDVWPVMDRSFEFLWSLHQRSFIEVERRDGTIITGYFVGMDRAGGQISIVAPHSTKAIAAGIGARTLKRFEKFRVDRLGRIFTVARETRTWHGVACT

SEQ ID NO: 8607 - protein, 1045 aa, synthetic construct
  REGION 1..1045: note = Synthetic
MGRPIARRILGIDLGIASCGWGIIEVGEAAGNIVAAGVRCFDAPLVDKTGEPKSATRRTARGQRRIVRRRRQRMNAIRQLLHKHGVLPDQSPDTLHHALRRIPPDAAGSQVTPWTLRAAAHQRLLTNDELAVVLGHIARHRGFRSNSKSEAGANAADETSRMKKAMEATREGLAKYPSFGAMIACDPKFKDRKRNRDGDYSHTAKRSDLEDEVRAISRAQIRFGSQIASEKFSQAFSDVAFFQRPLQDSEDKVGDCPFESGQKRTARRAPSFELFRFLSRLANLKLASGRSPERNLTQEEIALAVNGFGESKKTITFKSLRETLDLDPNIRFAGIAKEKESTLDIAARTGGAAYGTKTLKDALGEAPWRSLLRTPEKLDRIAEVLSFREDMHSIRAGLDEIGLDAVVVDVLLQAAANGDFRDFTKAAHISALAARNIVPGLREGLVYSDACARVGYDHAARPSVSLEQIGSPVTRKAFGEAIKQVRAVAREYGPIDFVHIELARSVGKSAEERAKLTRGLDDRTAVKERRRRDAAEHLGRAVSDDELLRYELAHEQGFKCIYSGDAIDPAGISANDSRYQVDHILPWSRFGDDSFLNKTLCTAKANQDKRGRTPFEWFDADKTEPEWMEFVARVEGLKEVKGRKKRNYCIKDAASIEDRFKARNLTDTQWATRLLADELKRMFPAPDGERRIFTRPGAITSKLRRAWGLEGLKKLDGKRTEDDRHHAVDAAVLAATTESLLNRLTLEVQKREREGRQDDIFHCSPPWPGFRVDVKRAIYGSDGAPGIFVSRAERRRARGKAHDATIKQVREINDDRLVFERKPIAKLTERDLEKIPVPQPYGKIADPGRLRDELVENLRAWIAAGKPKDKPPLSPKGDIIRKVRVETKDKVAVEINGGTVDRGDMARVDVFRKRSRKGAWEYFVVPIYPHQIVSSASPPNRAVVAYKAESDWTSIDDSFEFAWSLNPMSYLELVKSSGELIEGYYRSMDRTTGAINLSPMATNSETIRSIGVKTLSSFRKFAIDRLGRKFEVPREVRTWRGEAST

SEQ ID NO: 8608 - protein, 1012 aa, synthetic construct
  REGION 1..1012: note = Synthetic
MRSFGIDAGIASVGWAVMDNDGAGGSIVACGTRMFDAPETDKDRKPTNAIRREKRGMRRVLRRRRQRMNAVRQLLADHGLLAGRSNDSLALGIDPWALRAAGLDRPLADSEFAAVLGHIARHRGFRSNAKAERASNASNETSKMLREIDANRDRLSQWRTIGEMFACDVAFAGRKRNRGGGFSCSILRDDQENEIRRLFAAQYRLGNARATEELEQAFIATAFSQRPMRDSDDLVGFCSLIPTQRRCARRSHAFEMFRLLSRLNTIRIGAPGGAERRLSAAEIALITGDFGVQKTMSWKFLRKRLDLAPSTRFADVAAEDEKNDFVARAGAAAEGSYAIRQVVGDAGWKSLLAQPEALDELAAILTFRADVGSIRVGIMALPIESLIAETLINAAENGKFDHFTGAGHISAAAARALLPYLARGLVYSEACAELGFDPAARAEVILSDVKNPIARKSVSEVLKQVKIMVHEFGLPDRIHVELARDIGKGVSERDEISRGIEKRNKQRDRQRDDFTELLGRAPMSADDMLRFELWQEQNGRCLYTDRDIPVLSVAGTDNSVQVDHILPWSRFGDDSFVNKTLCFTSANSEKRGRTPYEWFIAEKTPTEWAVFQARVDSCKSMKSYKKRGHYLRQNAAEVEERFKARNLGDTRYATRLALDLIARKYYPDPMTRHVLARPGALTSKLRRGWGLEFRKKDANGKRLSDDRHHALDAIVVAACSEAMLNKLTRAFQEAEAQGLGRDFGALDQPWDGFREQVMAAVDTVLVSRAERHRARGEAHAATIKQIRERDGKLVVFERKAIDALKSSDLGRIKDSERNRAIVESLGAWITAGKPKDKPPLSPKGDPIVKVRLATTDKINVEIRGGTAERGDMARVDVFQKNDAKGRARFYLVPVYPHQIAKMAVPPNQAVDAGKDESEWTVIDSTFHFMFSIYGNSLLEVTKPDGEVVTGYFKGLNRSVAAITLAEHQNPLAVKQRIGTRTLLRFRKFNIDRLGRHYEIKQETRTWHGVACT

SEQ ID NO: 8609 - protein, 1057 aa, synthetic construct
  REGION 1..1057: note = Synthetic
VVSQPTSRVDIPTLGVECQYTFHLAMGFPGSVMQTVRFPKTSLTTKRVLGVDLGIASCGWALIDLENDDAQAQSVGQIVALGTWMFDAPETDKERKPTNQIRRTMRGQRRVIRRRRQRMNAIRRLLFDHKLLPSDDKDVLKMPGRDPWKLRAEALDRVLGAEEFAVAVAHIAKHRGFKSNKKSDGANAADESSKMLKAIEASREKSAAYRTVGEMLVKDPAFTGRLRNRDGDYSRSLLRQDLEAETRKIFEEQRRLRNPIASEALQSSLAEIAFFQRPLQDSESLLGPCPFENDEKRTSKRAPSFELFRYLSRLTALRVRPGRTDRPLTADEISNAAANFGRTAKITFKSLRKTIGLDPDCRFVGVSIEDEKHDVAARKGEAAFGTAKLRDVLGDAGWLSLVKTPERLDRLAEVLTFRDAPERIRAGLEELALDPLIVKAVMDAVNAGAFARFTGAGHISSMAARAIIPFLRQGRVYSDACAQAGYDHAARPTVELKDIGSPVARKALSEAVKQVNAVVREYGIPDAIHIELARDVGKSKDQRDEIKSGIDKRNAEKDRLRTQYEEDIGHAPRTAEDLLRYELWKQQNCRCIYTDAYIDPKAVASTANEAQVDHILPWSRFGDDSFHNKALVTAKANQDKRGQTPFEWFSNTKSEDGWDAFVARVEGNKVFRGFKKRNLLLKNAAEVEERFRSRNLNDTRYASRALAGFLEQKYPPEPGRRRVFARPGSITSKLRQAWGVQDLKKDADGKRLSDDRHHALDALVCAATTEGILNRLTRAFQEAERRGLGREIADMPQPWPGFRDQAKAAVLSVFVARAERRRARGKAHDATIKQLDGGSIYERESVEKLTLKDLELVKGPERNGKLIESLRAWIEAGKPKNTSPLSPKGDPVRKVRILNRAKDGVSIRGGIVDRGEMVRVDVFRKKHRRGAWQYFLVPVYPHQVAMDTAPPRKWAQGGVLESEWQSVDEGHEFLWPLHPMSLIEMVKPDGEVLRGYFRGMDRSTGAIHVSLHQSRDAKVRGTGARTLSSLTKLTVDRLGRVHLVEREARTWHGAVCT

SEQ ID NO: 8610 - protein, 1038 aa, synthetic construct
  REGION 1..1038: note = Synthetic
MRVLGVDLGIASCGWAVVETDVETPSVVAAGARCFDAPLVDKTGEPKSAVRRAARGQRRVIRRRRQRMQSVRAILHGAGLLESAGRDAQREALRRVQQDSADDKPTPWRLRAEAHDRLLSADEFSVALGHIARHRGFRSNSKRDAGANAADETSKMKKAMEQTREGLAKYRSFGEMLDGDPKFADRKRNRDKDYSHTPKRSDLEDEIRLIFAAQRRFDNPRATEALQAEIASAAFDQRPLQDSEGKVGPCPFETGEKRTAKRAPSFELFRFLSRLANLRLTAGGAEPKLTPEEIARAARGFGEQKSITFKTLRKLLDLDPNTRFAGISPDKEGLDVAARTGAAAAGTFALRDALCGAPWNALARTPEKLDRIAEVLTFREDIGRIEEGLQDIGLEPLVLNRLVEATREGKFSEFRGAAHISAKAARAVIPGLREGLVYSEACARVGYDHAARAAVSLDEINSPVTRRAFGEAIKQIRAVAHAYGPIDCFHIELARDVGKSAEERRELTDGIEKRNVEKELRRGLAAETLARAVSDDELLRYELATEQLFRCVYCDGSIAPNGFRADDTRYQVDHILPWSRFGDDSYRNKTLCCTRCNQEKRGRTPYEWFTDDKTEAQWETFAGVVEGLKGMKGLKKRNFRLKDAKAVEDKFKSRNLTDTRWASRLLADELKRMFPAPEGTRRVFARPGAITSKLRRAWGLETLKKIDGERVSDDRHHAVDAIVLAATTESLLQAMTKDIQRREGEGRADDIFHVPQPWPHFRAEVERVVYGENGIGGVFVSRAERRRARGKAHDATIKQIREVDGREVVFERKAIEKLGDKDLDRIPVPEPYGNVADPAKLRDALVESLRAWIAAGKPKSPDKLPRSPKGDVIRKVRVRTKDQVAIRLHGGTVDRTAITRIDVFETNDPKSRSRYRFVPIYRHQLVDNTVPVRYFELRKNQDNWKPISTFDVYLFSLNPMSLVEIKSGNKPPTVWYYRGFDSNDGRMSLSPQETKDDEFQVRIAPTTIESIRKLTIDRLGFWKPVEAETRTWRGAACT

SEQ ID NO: 8611 - protein, 1017 aa, synthetic construct
  REGION 1..1017: note = Synthetic
MRTLGIDGGIASIGWGLLDVDTDAGALTIVAAGVRTFDAPETAKERMPTNAVRRLHRGQRRVIRRRRQRMNQVRRLFLSTGLLPRADSNALALAGLNPWRLRAEGLERLLSGPELAVVLGHIARHRGFKSNAKRDAAANAADETSKMKKAIETTRDRLEGRTIGQMFATDPAFQDRKRNRGDFSRSILRADQENEVRQIFAEQRRRGNDLATERLEDDFGRIAFFQRPLQDSEDMVQYCLFEPKERRTARRSYAFEMFRLLSRLATISLSAGGRDERLNADQIARVADDFGKTKGISYKGVRKILDLDNRTRFVGVPEKDEKNDIVARHGNAAEGTAALRDVAGPSGWRVLMHNPQMRDRIAEVLSFREDPVSVRAGLIEAGLEEPLLGAVMLGVENGTFGKFSRAGHISAKAARALLEPLRRGLVYSEACEEVGYDHSAPASVSLEDVRNPVARKAVTEMLKQVRAIVQAYGLPDYIHVELARDIGKSAEERDKITKGIEDQNKKRSKSREELEELLERRLVGDELLRYELWKEQNGWCLYTGEQIKLEWIAADDNRVQIDHILPWGRFGDDSFTNKTLCLASANQAKKNRTPYEWYDEEGLDWPLFASRVEACKEMKGRKKGGFYLRKNAREVEETFRNRNLGDTRYATRLLLGMLARLYPRAIVLARPGQLTAKLRRAWGLDDLKKDVNGKRLEDDRHHALDAIIVAATTKSMLDRLTIAVQEARRLGLPRGFDFTQAPPPAAGFRDVVRQTVENVFVSRADRHRARGEAHAATIKRVETVDGVTTVFERKAVANLTLKDLERIPIPAPYGKIGDPMKLHAGMISELRQWIENEKPKDQMPRSPKGDLIRKVRIRSDDKIAVPVRGGTAGRGEMARVDVFGKPNKHGKFEYYLVPIYPHQIADRDMQPHPPNSYIVQGKPERDLDSSHTFRFSLYSHSLLEVVKSDGVIIRGYFKGLDRATGNIAIAAPRNSRDVTKGVGPKTLERFTKLNVDRLGNVTEVRNEVRTWHGVACI

SEQ ID NO: 8612 - protein, 835 aa, synthetic construct
  REGION 1..835: note = Synthetic
MIVLGLDGGIASIGWALIDEAEQRIIACGARCFDAPETDKDRVPTNQIRRQKRGMRRLIKRRRHRMRDIRQLFAAHGLLEHGDKDALTLGIDPWAVRSDGLERVLTPAELAAALGHIAAHRGFRSNAKRDRAANAADDASKMLKAIDDTRGKLTRYRTVGQMFAKDPDFALRKRNRGGDYSRTVKRDDLGHEVAVLFETQRRLGNLVASEALQEDFARIAFFQNPLKNSDDLVGNCLFERTERRTARRSPSFELFRLLSRLNALELVTPHGKHRFKPDELQTIVADFGTTKGVTFTAVRRLLKLDAATRFAGVGPDDEKNDVAARSGKAFEGSANLRDALGEALWAACLAAPEILDRIAEILTFRDDEDEIRAGLAEIACEAAVIDAVMKGLAAGAFTSFKGTARISAKAARAIVPGLLRGLVYSEACADAGYDHAAARVVGIGDVRNPVARKALAEMMRQVRTIVAKYGRLPDRIHVELARDVGKSAEERDEISRGIEKRNKQRDKARERFREKLRQEPSAEELLRFELWEEQNGRCLYTDDCIPVTELVSSSNVVQVDHILPWSRFGDDSYLNKTLCFASANQRKLDRTPFEWFSAEKTANDWVRFERAVEGCKAIRGAKKRGFYLRQNGAEVAERFRNRNLGDTRYATRVLMGLLARLYPKEGERHVLARPGALTSKLRRGWGLQGLKKDEDGKRLPDDRHHALDAIVLAVTTESMVQGLTRAFQEAERRGLARDFAGEAMVDPWPGFRVQAEEAVARVAVSRPERRQVPGEAHAATIKQVRVVDGAQVVFIRKAVEALTEKDLERVPVPAPYGRIADPAKLRAAMIEAIRA

SEQ ID NO: 8613 - protein, 1024 aa, synthetic construct
  REGION 1..1024: note = Synthetic
MRILGIDGGIATIGWAVLDLDTEAATLTVVNAGTRSFDAPETSKERTPTAAVRRLHRGQRRVIRRRRQRMNEIRRLFHTAGLLPAAKSDALGQKGLDPWALRAAALERTLTGPELAVALGHIARHRGFRSNAKRDAAANAADETSKMKKAIAATQERLQGYRTIGQMFATDDAYRDRKRNRGDFTRSILRTDQESEVRQIFREQRQRGNPLASEELEADFTHIAFFQRPLQDSEHMVQSCPFEPAEKRAARRSYAFEMFRLLSRLTAISLSAGGQELRLTPEQIAQVAEDFGRTKGITYKSVRKTLDLDSRTRFVGVSEKDEKNDIVARHGNAAEGTHTLREIVGPSGWRVLMHNPVMRDRIAEVLTFREDPASVQAGLAEAGLQEPLLAAVMQGVQSGAFAEFTRAGHISAKAARALIPSLQRGRVYSEACEDAGYDHTARAAVSLEDVRNPVARKAVCEMLKQVRAIVQAYGLPDMIHVELARDIGKSAEERDKISKGIEDRNKQRETARKELADLLERPANDEELLRYELWKEQNGRCLYTDTAIPPHWLAAGDNRVQVDHILPWSRFGDDSFINKTLCTAKANQDKRGRTPFEWFEAEGLDWALFATRVEGCKEMKGRKKGGFYLRKNAKEVEETFRNRNLGDTRYATRLLLDMLARQYPKDGSRHVLARPGQLTAKLRRAWALDDLKKGPDGKRLEDDRHHALDAIVIAATSESMLNRLTKAAQEAERQGLPRGFDFTQIDPPAAGFREVVRDVVRNVFVSRAERRRARGEAHAATIKRVETVDGVATVFERKAVEALTLNDLANIPIPDPYGKVVDPAKLRNELVESLRCWIEAGKPKNAPPRSPKGDVIRKVRLATKDKVAVPVREGSADRGDMARVDVFAKADRKGKLRHYLVPIYPHQIADRQTWPEPPNRAVVADKAEADWAVVDSDYEFLFSLYSHSLLEVAKADGVVLKGYFKGMDRSTGAIAIAAPESPRALTRGIGAKTLAHFRKLQVDRLGRVTAVNKEVRTWHGVACT

SEQ ID NO: 8614 - protein, 1020 aa, synthetic construct
  REGION 1..1020: note = Synthetic
MRVLGLDAGIASVGWALIDTPEEDGEGRIIACGSRCFDAPETDKERTPTNQIRRQKRAMRRVVRRRAQRMSKIRLILHHHGLIAAPARDALALKLDPWTLRADGLERTLTAPELAAALGHIAVHRGFKSNSKRDRAANAADDSSKMLSAIAATQERLAQYRTIGELFARDKTYAERKRNRTGDYSRSILRDDQAAEVRRLFAEQRRLGNGMASEALEAEFSEAAFFQRPLQDSDALVGFCPFERGERRAARRGYSNELSRLLQRLNALTLVWRGGERRITEDEIALLSRDFGAVKKITFKSVRKALDLDPSVRFDGIKEEDEKHDVVARSGNAAEGTATLRAALGTDWAALAARPEVLDAMAAVITFRDDLESIHAGLAATGAPASAVAAVMAAVERGACAEFKGAGRISAKAARAIIPGLRRGLVYSDACADAGYDHAARMAVGVADIRNPVARTALAEIMRQVRAVVEAHGLPDRMHVELARDVGKSTEERDEITRGIEKKNKERDKTRARFEELLGRKPRGDDMLRFELWEEQNGRCLYTDAEIPVGLVSASENGAQVDHILPWSRFGDDSFANKTLCLAKANQEKAGRTPYEWLGEGPRWEHLVACVEGCKSMKGRKKRGFYLRKNAAEVEETFRNRNLGDTRYATRVALDLLARMYPDDGTKHVLARPGALTSKLRRGWGLQGLKKGEDGKRIEDDRHHALDAIVLAATTESMVNRLTRAFQDAEKKGSAREFAGEFVPPPWPGFRLDAEAAVEAVVVARPERRKIPGEAHAATIKQVREVDGAAVVFIRKDVEKLTEKDIDLIPVPAPYGRIADPAKLRGLMIEAIRAWWAAGKPKDAPPRMPNGDVIRKVRVQTSDKVAVSVRGGTADRGDMARVDVFRETDAKGRVRFHLVPIYPHQIVGMETAPGRAVVAHKPEGEWLDIGRPEFECRFSLYPNSLLEVTRSDGEVISGYFKGLDRSTGNIAVADVRSQTTVTRGIGCKTLLSFRKLNITRLGSVSEVLQETRTWRGEACM

SEQ ID NO: 8615 - protein, 1025 aa, synthetic construct
  REGION 1..1025: note = Synthetic
MEDLVERILGIDLGIASCGWAVIEMSDGDGRILGAGVRCWEAPEVPKTREPKNHDRRLARGQRRVIRRRRQRMGSIRKLFAKAGLLPDSNHDALRTPGIDPWRVRAEGLDRLLAPAEFAVALGHIARHRGFRSNSKRDHGANAPSETSLMLKAMEATRGKLSKYRTVGEMFLLDPEFEIRKRNRGDYTRSILRRDLEDEVTKLFERQRALGNTGATELLQREYSDIAFFQRRLADSWDKVGLCPFELEEKRAAKHSPSFELFRFLARLNTLRVGTGRTYRALTEAEIRAAMADFASTKGMTFARLRRVAAIAEDRFQSVAPDDEKTRDVVTRTKDGAAGTVALKECLGDSVWSGLLQRPEVLDRIAAILTFFESPESMQPEFIRLGLDPIVAAALTKGVANGAFAKFKGAGHISAKAARNVIPHLMRGLTYDKACAEAGYNHTQRIETEITNPVARKAVLEAEKQIRAIVRQYGMPDRIHIELARDVGKSAEERKEISNGIEKRNKQKDRLRDVEFPDAVGRPPHSAEEMLRFELWKEQAGKCLYTDENISPGQIAAGDNSVQVDHILPWSRFGDDSFMNRTLCTARANQQKKGRTPFEWFKADKTEAEWEAFRARVETNKHLRGYKKRNYLLLNAEEVEERFKTRNLNDTRYAARALMARLDASYPPELKSRRVFARPGALTQKLRRAWGVDDLKKDPATRARVEDDRHHALDAIVLAATSESALIRLTRAFQEAERKGLAREFGGLDLPWRSFIGDARAAYLGVFVSRGEIRRARGKAHDATIKQVREANGEQVVYERKAVDKLTLADLDRIPVPEPYGRIADPSKLRDGTVAALRAWIDAGKPKSAPPRSPRGDVIRKVRVATKSNVAVGIRGGTADRGEMVRVDVFVKPNAKGIRQFFLVPIYPHEVATLDKPPNRAVQGGAEESRWPLMDSSYEFLWSIYPMSLLELTKADGVTIEGYFKGLDRSTGAINVAEVTSNQKLAGRSIGARSLASFRKLSVDRLGRVSEVARETRTWRGVVCI

SEQ ID NO: 8616 - protein, 1048 aa, synthetic construct
  REGION 1..1048: note = Synthetic
MRGKMPERVLGLDVGIASCGWGVLDVENGRLIAAGVRCFDAPLVEKTGEPKSAGRRLARGQRRIIRRRRQRMNAARKLLVDYGLLSSSDRDALHAAAQSAAPHSPWALRSAALERKLSPPECAAVLGHIARHRGFRSNAKTVAGNAADETSKMKKDMAKTSEKLAQYRSFGDMVSNDPVFAARKRNRDKDYALTPYRSDLEQEVNAIFTAQRRFGNDAMTVDLQSRFAQIAFSQRPLPDSDGKVGDCPFEPAEKRAARRSPSFELFRFLSRLTALELSIGRAPARRLNRSEIAAAVKLFGVNKSLTFAALRKALEIDPNARFSVPEGDKKGKSLDVVARAGAAAEGTKTLHDALGEAAWASLRKTPERLDRIAEVLSFREDLDSIRQGLAEAGAEPAIADRLVEAAGQGEFREFTRAGHISAKACRAIIPHLMEGLVYSEACERAGYDHAARPQTSLKDINSPVTRRAFLETIKQVRAIVREHGPIDNVHIELARAVGKSAEERKKLKDGLEERTAEKERRREEASGILKRRATDDELLRYELAFEQQWKCIYSGEPIAGDGFAANDTRYQVDHILPWSRFGDDSYLNKTLCTTRANQEKRGRTPYEWYTADKPEDDWALYEARVESLSRDQVKGRKKRNFLLKNAEAIEERFRARNLHDTQWVTRLLADELARMFPPRDARRTGDSDERRVFARPGAVTSKLRRAWGLEGLKKNEQGERVSDDRHHAVDALVLAATTESLLQKMTREIQQREREGRQDDIFHVQQPWPGFRMDVEKAVYGENGGGGVFVSRAERRRARGKAHDATIKQVREIDGEQRVYIRKDVLKLTAADLDLIPVPAPYGKIADPRKLRDEMVESLRAWLEAPLAERKKTPPLSPKGDPIRKVRLLSKDKVAVELNGGTVDRGDMARVDVFRKQNARGKWEFYVVPVYPHQIATMDTPPEKYVRGATDEAEWPMLDGSFEFLWSLNPMDWLEIVKSNGEAVEGYYRSLDRATGAINLSPPHTKDAMIRSIGVKTLSSFRKFRIDRLGRKSEVLREVRTWRGKACT

SEQ ID NO: 8617 - protein, 1064 aa, synthetic construct
  REGION 1..1064: note = Synthetic
LPWFPNRLPTFGCHVARRASIFRERPSTIRTAMKVLGLDCGIASVGWAVLHLDDSETTGEIIAAGTRMFDAPETEKERRPKSEQRRMYRGQRRVIRRRRQRMNAVRQLLHRHGLIPDGERDALRFQGLDPWALRGIARERLLTPYEFAIVLGHIARHRGFKSNAKSRGENAAEDSRMKKAMAETQAMRAGRTFGEMLATDPRFADRKRNRVGDYHQTPQRADLEAETRQIFAAQRRLQNPAAIPELEQDFAAKAFFQRGLQDSENLVAACAFEPGERRTAKRAPSFELFRYLSRLNTLEIREGRRGRRLAAEELARAMASFGATRKITYKALRKIMRLRAEETFANVRVEDETKDVVARHGEAAAGTTVLRDTLGQHAWEALRDTPEKLDRIAEVVSFRTDHASIRKGLEEAGLDAPTIERLMAAVADGTFDKFTGAGHISAKACRNIVPHLARGLVYSDAAAACGDDHTASRERNAFSVGVRGKAALARILSGEVIDRSLVGSPIARKALIEAVKQVKAIVEEYGIPDAIHVELARDVGKGIEERREIERGIEKRNKEKEKLRERFAEDVGVPCGSAEDLLRYELWLEQSGRCVYSDAPISPRDIVATSNAVQVDHILPWSRFSDDSFNNKTLCTARANQEKRGRTPFEWFSQEKPESDWDAYVARIAALKSLRGFKRRNYTIKDAVSVEEKFRTRNLNDTRWTSRLLAEVLRQLYPVDEDQRRVYARPGALTDRLRRAWGLQWIKKDEGGKRIADDRHHALDAIITAACSESQLLRLTKAFQEEERKGSPRDFRSFEPPWPGFREKALQAVEKVFVSRAERRRARGEAHAATIRSVSERDGEALVFERRSVADLKLADLDRIKDKERNAAIVQSLKAWIDAGKPKDTSPRSPKGDAITKVTLLTNKKPEVMMRGGVVDRGEMARVDVFRKRNRKGAWEFFLIPIYPHQIANDELPPMKAAQGGKPEAEWPTIDASFDFLWSLNPMAYLEIETSKNDLIAGYYRSMDRSTGAIVLSNHENPNAITRGIGARTLKVMNKYSVDRLGRRHLVEREQRTWRGKVCT

SEQ ID NO: 8618 - protein, 1021 aa, synthetic construct
  REGION 1..1021: note = Synthetic
MIVLGLDGGIASIGWALIDEAEQRIIACGARCFDAPETDKDRVPTNQIRRQKRGMRRLIKRRRHRMRDIRQLFAAHGLLEHGDKDALTLGIDPWAVRSDGLERVLTPAELAAALGHIAAHRGFRSNAKRDRAANAADDASKMLKAIDDTRGKLTRYRTVGQMFAKDPDFALRKRNRGGDYSRTVKRDDLGHEVAVLFETQRRLGNLVASEALQEDFARIAFFQNPLKNSDDLVGNCLFERTERRTARRSPSFELFRLLSRLNALELVTPHGKHRFKPDELQTIVADFGTTKGVTFTAVRRLLKLDAATRFAGVGPDDEKNDVAARSGKAFEGSANLRDALGEALWAACLAAPEILDRIAEILTFRDDEDEIRAGLAEIACEAAVIDAVMKGLAAGAFTSFKGTARISAKAARAIVPGLLRGLVYSEACADAGYDHAAARVVGIGDVRNPVARKALAEMMRQVRTIVAKYGRLPDRIHVELARDVGKSAEERDEISRGIEKRNKQRDKARERFREKLRQEPSAEDLLRFELWEEQNGRCLYTDDCIPVTELVSSSNVVQVDHILPWSRFGDDSYLNKTLCFASANQRKLDRTPFEWFSAEKTANDWVRFERAVEGCKAIRGAKKRGFYLRQNGAEVAERFRNRNLGDTRYATRVLMGLLARLYPKEGERHVLARPGALTSKLRRGWGLQGLKKDEDGKRLPDDRHHALDAIVLAVTTESMVQGLTRAFQEAERRGLARDFAGEAMVDPWPGFRVQAEEAVARVAVSRPERRQVPGEAHAATIKQVRVVDGAQVVFIRKAVEALTEKDLERVPVPAPYGRIADPAKLRAAMIEAIRAWWANGKPKDAMPQMPNGDVIRKVRVQSTDKVAVSVRGGTADRGDMARVDVFREIDRKGKVRFHLVPIYPHQLATLKEPPNLAIVQSKNEDEWTNVRGPEFDFLFSLYQNSLIEIQKSKGPMVRGYFKGAHRGTAALSLATMVSPTDLTDGIGSKTLLDLRKLKIDRLGIISVAPEEPRTWRGAVCT

SEQ ID NO: 8619 - protein, 1041 aa, synthetic construct
  REGION 1..1041: note = Synthetic
MEGSARILGIDLGIASCGWGVIEVKDETGRVIAAGVRCFDPPLVEKTGEPKSAERRAARGQRRVIRRRRQRMIAIRNLLHKHALLPDAKDDALAHALRRISPPGRNPQVTPWMLRAVAHDRLLTDDEFAVVLGHIARHRGFRSNSKREATTNAADETSKMKKAMEETREGLAKYRSFGEMLALDPKFTERKRNRDKDYSHTAKRSDLEDEVKKIFQAQRRFQNARATEELERQFIDKAFSQRPLQDSEDKVGNCPFEPDQKRTSKRAPSFEQFRFLQRLVNLRITVGRAERPLTADEIGIVLKRFGEQKSYTYKTLRKDLDLDPNARFSAVSRNNENLDIAARKGQSAYGTCTLRDVLGEAPWQSLLKTPEKLDRIAEILTFREDLESIRRGLAELGLDSALLDCLMNAAREGAFTEFKGAAHISALAARKLIPGLREGLVYSDACARVGYDHTARPAISLDQIGSPVTRRAFAEAIKQVRAVAREYGPFDAIHVELARDVGKSAEERAEITRGIEERNAEKDRRRKEAADLLKRDISDDELLRYELAKEQNFKCVYCDGAIAPTGFAANDTRWQVDHILPWSRFGDDSYLNKTLCCVKCNQDKRGRTPFEWFSEDKTEKDWESFVARLDNLKEMRKGLKKRNFKLRDAASVEEKFKERNLTDTKWVTRLLADELKRMFPAPEGKRRVFTRPGAITSKLRRAWGLEGAKKENGERVPDDRHHAVDALVLAATTESLLQRMTKEIQKREREGRADDIFHVQQPWPGFRLDVMRTVYGENGSGGVFVSRAERRRARGKAHDATIKQIREIDGEQVVFERRPIEKLTEKDLERIPIPEPYGKVVDPKKLRDQTVEALRAWIAAGKPKDNPPRSPKGDIIRKVRVATKDKVALEINGGTVDRGEMARVDIFRKANHKGQWEYFAVPIYPHQIATMEQPPNKYVKGATNEDEWPVIDSSYEFLWSLQPMNYLEIVKGNGECVEGYYRSLDRATGAINLSPMKTNDELIRSIGIKTLANFKKFMIDRLGRKFEVQRELRTWRGKVCT

SEQ ID NO: 8620 - protein, 1039 aa, synthetic construct
  REGION 1..1039: note = Synthetic
MRILGIDGGIASTGWAMVDISETEADGRVVAAGSRTFESPEEPSQTGPKLKNADRRMYRGQRRVVRRRAQRMAQIRQLLHQAGLLEDQKRSALEGKGADPWLLRAEGLDRCLTPREFALALGHIAIHRGFRSNSKRDRAANAADDNSKMLSAIHATQERLAHWRTVGEMFARDPEFAQRRRNRSGDFTRSIMRSDQEAEVRKLFEQQRCLGNKAASYDLMASFADIAFSQRPLGSSEDKVGDCIFEPTEKRTARFAPSFERFRLLSRLINLRLQSGRVERALNPGELALCIEGFGKTKGISFKAIRNRLDLDANTRFAGVAKHDEKHDVAARTGSAAAGTAAFIKALQTVGEIEARTLLSECSKLDRAAEIITFNEDTSAIKAGLAGTGLSSEAQDAIVKAIDAGDFDHFKGAAHISAKAARNIIPGLMQGLVYSEACEAVGYDHSARAAMSIDDIGSPVARKALSEMLKQVKVLAHEFGPFDRIHIEMARDVGKSIEERGKIERGIEKRTSEKDRLRLEMQQLLPHLTRISGEDLLRFELWKEQNGRCLYTDQAISPAIVVASDNNVQVDHILPWSRFGDDSFINKTLCFTSANAEKRGDTPYEWFMRTKPDEWDRFAAQVEACKTLKGRKKRNYLMRNAEERESQFRERNLNDTRYATRILLGELKRHYFPDAPHHVAARPGELTAKLRQAWGIEKLKKDKETGKRLPDDRHHALDAIVVAVVNERLLQWSTKASQQAERTGAKFELHGLPEPWPNFREEVTALHEKVFVSRAEVRRARGKAHDAGIKQLRTIEEEEKVFERKAVEKLTLKDLDLIPVPEPYGKVADPQKLRDAMVETLRAWILATKNKQKGEIIPPPRSSKGDIIRKVRVMTNAKPAVMVRGGTADRGGIVRVDVFTKPNKRGAAEFFLVPVYVHEAATLPEPPNRAVQAYAAEADWPVMTTDFTFKFSLYAMSLVEVYKKDGEVTKGYFRGIHRTTGAINISDVSNSSLTTDGIGARTLMEFKKLSVDRLGRVSEIVSETRTWRGEVFISPNPDG

SEQ ID NO: 8621 - protein, 1017 aa, synthetic construct
  REGION 1..1017: note = Synthetic
MGSLGDTSLGIDLGIGSCGWALIREDTQEIIAMGSRCFDVPETDKDRTPTNQIRRSNRLMRRVTRRRARRMKDVRALCRRFGLVDDAEPEAFTAARLDPWALRAQGLDRALNGQELAAVLLHIAKHRGFRSNSKRDRGANAPKDSSNMLMSIAETSARLASWRTVGEMFACDPAFAGRKRNRDSGYDRSILRADQEKEIALLFDRQRIFRNHLASQDLERAYRELAFFQRPIGDSEDSVGDCPFITGEKRAARHAYSYERFRLLSRLAALRLRRGREEVALSQEQIAVASADMGSNRGLSFARLRRLLALDDHWRFDGVSPADEKSRDVVARSGAATPGSFALRRAMGESPWRSLLATPEVLDRIAAIFAFRDELDSIHAGLAEAGLPSLLLDILMAAAEKGDFEEFKKAGHISATACRAIIPFLEQGLVYSEACKAAGFDHAARQMIVIEDIANPIARKALTEAVKQVRALIAEFGLPGRIHVELARDVGKSQEERDEISRGIDRRNREKGRLHDEFTENLGRPPLNGEELLRFELWKEQNGRCLYTDEAISITAVVGSDNIVQVDHILPWSRSGDDSFVNKTLCFAKANQKKRGRTPFEWFSADLSENDWEAFVARIETLKGMKGRKKRNFLLKDAVILEKRFRERNLNDTRYACRVLIDLLSRLYPDDGRRHVFARPGPLTDRLRRAWGVNDLKKGPDGQRLSDDRHHALDALVVAATGEGALNRLTRAFQEAERLGAPRDFRAFAPPWLGFTEQARTAFAGVFVSRPERHRARGEGHAATIRQIRERDGKAVIFERKAVEKLTVSDLARIKDAERNHRLVDSLRTWIDAGKPKSMLPLSPKGDPISKVRVATSKKVDVLVREGAAERGEMVRIDVFRKAKPKHGFEFYLVPVYPHQVMDSEGWPFPPNRAIQAYKEETEWPEIEAEHEFLFSLRPFSYVQLTKRDGTIIEGYFRGANRSTGALMVSMQNDNTEVREGIGARTLGCIRKFHVDRLGRRFEIQRETRTWHGVPCT

SEQ ID NO: 8622 - protein, 967 aa, synthetic construct
  REGION 1..967: note = Synthetic
  SITE 268: note = misc_feature - Xaa can be any naturally occurring amino acid
  SITE 31: note = misc_feature - Xaa can be any naturally occurring amino acid
LGPAVGPSFGRTLRVERLSVSVLGCLTCRKXQLRREHRGQRRVIGRRRQRMIAIRALFRESGLIEAHGKDALKVPGLDPWALRVAALDRKLSGLELAVALGHIAKHRGFKSNSKRDRGANAPRDSSEMLRSIGATRERLARYRTVADMFANDADYSKRKRNRDGDYSRSVLRDDLEDEVRLLFARQRQYGSALATEEFEQRFVEIAFFQRPISDSEEKVGFCPFEEGERRAAKNSYSFELFRLLSRLTALRIRRSRDERSLTAGEISXGVSTEEEAKRDIVARTGDAAPGTHALRKTLGDTWRVMLSSPAQLDRIAEILSFREDMTSIHGGLQEIGLDPLVLGAIMKGVEEGAFSTFRGAGHVSAKACRAIIPHLQRGLVYSDACKEAGYDHTRRPATQLEEIGNPIARKAVSEALKQVRAIVQEYGLPGRIHVELARDVGKSKEEREEITRGIERRNKEKERLRRQFKDDVGVEPGSAEDLLRYELWKEQNGRCLYTDQPIPPGAIVASDNSVQIDHILPWSRSGDDSFVNKTLCFAQANQNKKGRTPFEWFGQDMPVAAWDSFVERVETNKQMKGRKKRNYLLKDASVLEERFRARNLNDTRYAARVLAGTLRRLYPADGKARIFARPGPLTDRLRRGWGIQDLKKDPAGRRLDDDRHHALDALVVAATSGSALQRLTLAFQEAEKRGDHRDFRDLPLPWPGFVQEAREKVKNVFVARNERRRARGEAHGATVRQMVEREGKIVVFERKAVEALKLGDIDRIKDPERNFKLVEALRNWMEAGKPKDRPPLSPKGDPITKVRLRTNKKPDVLIRDGAADRGDMVRVDVFRKSKRNGAWEFFLVPIYPHQVMDAENWREPPNRAIQANSDEGAWPLLDHPYKFCWSLYPQTLLEVVKPDGEVIVGYLRSVDRNTGAFTISPHHTKSEIRKGIGSRTLRDIQKYHVDRLGRRFKVGLEPRTWRGAVCT

SEQ ID NO: 8623 - protein, 1059 aa, synthetic construct
  REGION 1..1059: note = Synthetic
MAPPCQAGMNKGQQVMRIFGIDGGIATIGWAVADLTDETMDIVAAGTRTFDAPETDKTRTPTNAVRRLHRGQRRVIRRRRQRMTELRHLFADTGLTTSIARDALAPKAAEPRLDPWQLRAQGLDRLLSGPELAVALGHIARHRGFRSNAKREAGANANDETSKMKKGIALTTERLAGYGTIGALFANHPEYQDRKHNRGLNFDRSILRGDQEDEVRKLFAAQRRLGNAAATAEFEADYAHIAFTQRPLQDSEHMVGPCLFESGERCTARRSYAFEMFRLLQRLNNIRLTARGQKEDQKLNAEQIALVTKDFGKQKKLSWKWLRKTLDLAPATRFAGVSDKDEDKDFVARAGNAAEGTYVLRAVVLGEAGWRDLAKNPALRDRIAEVLTFREDPASIRAGLEEAGAERTILDQLMQGVETGTFGQFTKAGHISAKAARKLIPGLSRGLIYSEACKEIDYDHAAKPGLILGSFNTKEEWRALIAALNDQVRNPVARKAVTEMLKQARAMIQAHGLPDCIHVELARDIGKSAEERDKITKGIEDRNKQRDKLRAELAELLGRQPKLDDMIRFELWKEQAGFCLYTGDPIPPGAIAASDNSVQVDHILPWSRFGDDSFMNKTLCFTHANQAKKDRTPFEWCEAEGRDWPLFAARVEACKEMKGRKKGAFYLRKNAQEVQDTFRTRNLNDTRYATKLLLDLLARLYPKDGKRHVLARPGTLTAKLRRAWGLDDLKKGPDGKRLDDDRHHALDAIVVAATSEAMLQRLTKAAQEAERRGMARGWDFDELREPAVGFREEVRSVVDKVFVSRADRHRARGEAHAATIKQVRQVDGAAVVFERKAVEKLTIGDLDNIPMPEPYGKIADPGKLRDELVATLRAWIEAEKPKGAPPRSPKGDVIRKVRVATKDKVAVSVRGGTADRGDMARVDVFAKANKRGKREFYLVPVYPHEVAGSASPPDRAPAPHVDRANWTPIDPTYDFLFSLHQNSLVEAVSAKGQVFYGYFKGYDIAGGNLGVATPENSRQLSGRPGAKTLLSFRKFSVDRLGQVSEVKEEIRTWHGEACT

SEQ ID NO: 8624 - protein, 714 aa, synthetic construct
  REGION 1..714: note = Synthetic
MALVFGLDIGIASIGWAAIDDTQEITPLLGLGSRIFVAAEVPKTGESLAKPRREARGMRRRIRRRAHRMARIRRLFYRVGLINDVVPEVLSDITADDLTPWLLRADGLDRQLNQRDWARVLLHIAKHRGFKSNRKSEASDKEGGKLLQGVTGNAKLLHDKNYRTIGEMVWKDEKFAEHKRNKGGDYSHTVARDDLLLEIKTLFQAQRKLGNTFAQADFEEDYTKIFASQRPVDDGEIADMVGFCTFEPDEKRAAKATYSAERFVLLSRLNNLMLIEAGERRVLDAAQRKTIETMAYKSVKVKYQQIRKALELPESIRFNLVQYKSGEIDKSEDTTFAELNAYHKLKKVITDSCGELAWGNLTNQPDKLDAIATALTWYKSDDKIREILAPEQLEPALLDAVLACSFDKAVALSLKALRNINPFLARGLRYDEACTAAGYDHSTPTEAQPQQFLPVIPTDEVRNPVVLRALTQARKVINAMIRKYGSPTQINIELSRELSQPYSERKEIEGKQKEFQAEKERTVKQFNDTFGRDPRGDEFTKFRLWREYNYCAYSGAYLEPARLLEEGYAEIDHILPYSRSMDDSLNNKVLCTSKANRDKGNKTPYEYLNGASASPQWHEYKIRIETHKAFRQAKRNRLLRVDFDEKAEQEFRERNLNDTRYIARFLQEFLKLNLQFAPSENKIKVQTRNGAVTSFLPPIGVCLKCVPMETCTML

SEQ ID NO: 8625 - protein, 1052 aa, synthetic construct
  REGION 1..1052: note = Synthetic
MALVFGLDIGIASIGWAAIDDTQEITPLLGLGSRIFVAAEVPKTGESLAKPRREARGMRRRIRRRAHRMARIRRLFYRVGLINDVVPEVLSDITADDLTPWLLRADGLDRQLNQRDWARVLLHIAKHRGFKSNRKSEASDKEGGKLLQGVTGNAKLLHDKNYRTIGEMVWKDEKFAEHKRNKGGDYSHTVARDDLLLEIKTLFQAQRKLGNTFAQADFEEDYTKIFASQRPVDDGEIADMVGFCTFEPDEKRAAKATYSAERFVLLSRLNNLMLIEAGERRVLDAAQRKTIETMAYKLTKVKYSQIRTALDLSASVRFNLVQYNSGEIDKSEDSAFAELKAYHKLKKVITDSCGELVWGNLTNQPDKLDAIATALTWYKSDDKIREVLAPEQIEPALLDAVLAESFDKAVALSLKALRNINPFLAQGLRYDEACTAAGYDHSAPTEAQPQQFLPYIPTDEVRNPVVLRALTQARKVINAMIRRYGSPTQINIELSRELSQPYSERKDIEGKQKEFQAEKERTVKQFNDTFGRDPRGDEFTKFRLWREYNYCAYSGTYLDPARLLEEGYAEIDHILPYSRSMDDSLNNKVLCTSKANRDKGNKTPYEYLNGASASPQWHDYKIRIETHKAFRQAKRNRLLRVDFDEKAEQEFRERNLNDTRYIARFLQEFLKLNLQFAPSENKIKVQTRNGAVTSFLRAHWGLLKVRADGDLHHALDAAVVACTTQGFVKRVSDYSRRKELWASDKKVGDNTRNLEITDTDTGEITATNYQKKDGRDFPLPWENFRADVKDALTEIFVSRAPTRKATGGVHDEKIRSTKRMTGEKPVTTSKTKLQDLSLASLENIPEKETRNANLYEALKKRIETGGKEPFAKPFYLGKNGEESDDAFGRLIKGVKLERTTKTGVLVRGGLADNGEMLRVDVFTKTGRFYLVPIYLADRVSGVLPNKAIRAATLEQDWPEIDETYQFAFSLCNNDLILIADKKGEDNSFLRGYFKRAHRGTGNINIEGHDRSWKKEGVGVQNIGTFKKLQVDVLGNVFEVKQEPRHGLAESAD

SEQ ID NO: 8626 - protein, 1051 aa, synthetic construct
  REGION 1..1051: note = Synthetic
MALVFGLDIGIASIGWAAIDEEQEIPLLGVGSRIFVSAEVPKTGESLALPRRLARGMRRRIRRRAHRMWRIRKLFLRDGLADDAALADLHETTADDLTPWLLRADGLNAKLNQRDWARVLLHIAKHRGFKSNRKSEAGDKEGGKLLMGVTGNAKLLKEKNYRTIGEMVWKDEKFAVHKRNKGGDYSHTVARDDLLLEITALFEAQRRFGHGNASEVFEIEYTKIFASQRPVDDGEIADMVGVCTFELGEKRAAKATHSAERFVLLSRLNNLMLIEAGERRILDAEQRKVIETMAYKSTAVKYKQIRKALDLPEAIRFNLVQYKSGEIDKTEDIIFAELKAYHKMRLAITNACGELAWGNLTSQPDKLDAIATALTWYKSDDKIREILAPEQLEPALLDAVLALSFDKAVALSLKALRNINPFLAQGLRYDEACTEAGYDHSVPTEARPQQFLPIIDVDEVRNPVVLRALTQARKVINAMIRRYGSPAQINIELARELSQPYSERKDIEGKQKEFQAEKERTVKQFNDTFGRDPRGDEFTKFRLWREYNYCAYSGVYLEPSRLLEEGYAEIDHILPYSRSMDDSLNNKVLCTSKANRDKGNKTPYEYLNGASLSPQWHQYKVRIETHKAFRQAKRNRLLRVDFDETAEQEFRERNLNDTRYIARFLQEFLKLNLQFSPSDNKIKVQTRNGAVTSFLRAHWGLLKVRADGDLHHALDAAVVACTTQAFVKRISDYSRQKELWASDKKSGDNSRNLEIVDTDTGEITATNYQQKNAKDFPIPWLGFRADLKDALTEVFVSRAPTRKATGGVHDEKIRSTKRMTGEKPVTTSKTKLQDLTLASLENIPDKLTRNANLYQALKKRIEAGGKEPFAQAFYLGKNGEEDDAADGRLIKAIKLERTTKTGVLVRGGLADNGEMLRVDVFTKTGKFYLVPIYLADRVGGVLPNKAIRAATLEQDWPEMDETYAFAFSLCNNDLILISDKDGGDGAFLRGYFKGAHRGTGAINIEGHDRSWKKEGIGVQRLAAFKKLQVDVLGNVFEVKKELRHDLAESPD

SEQ ID NO: 8627 - protein, 1219 aa, synthetic construct
  REGION 1..1219: note = Synthetic
LPGGRKRLQPAGCAGCARSPEGGACEFLLLRENRRPRSITLVFMLTLALPPVKCYSCHLHFTYIRRPHMITLGLDIGSNSVGSAWVDTETGVLDMGASVFPAGVEEQSGKRGAPVNQNRRQKRQLRRSIARRAERKRLLKKTLTDAGLLPQSVLEIESVCAEDPWQLRRKALSEPLTPYQFGRVLLHLNQRRGASNIVLDEENKEEGAIKEAMDRLRRQLDKRTVGEFMAGLMEQRASELEKKPGTLIRKPIRNRLYRLDPKEYLYADRTLIREEFNKLWNAQKSFSGPLAALLTDELRKQLDDPSGDRIWQSRGLLFGQRRQYWDTGTLGHCSLEPTDLGCPLADMYAQEFRVIESVNNIRIEERGKPARPLTPEERSRVIAVLRSQKTATPSTVRKALGLNKKDIKEFFTLNIERDKERSLNTDWFWREIVLGVWGEKAWQHLDESVHQSVNRAIQAFDPEKPEHIEKLRRGCGQWWRLDATATERLVAAWQKRPTIDKRLKLSRRAIRNLLPYMNRRKPDGTWPTQMEARIAFAEDGDAVDQVTGQEPTPVQRRRYSLKGNPPNRKARRFTQKHPDMLPPAPILANPVVRKAIHEVRRHVTAYLRKYGRRPDRVVIELAREAKLPAVVRDKQLATNRQREKIRKAIADQYDLRLGTTAQQRKAEERVLLCRQQRNICPYCGGTIDEKAAANGAGVEIDHIVPFSRCGDNSLNNRVLCHTHCNRGKGSLTPKEWLSPEDFAALETRLAHFEKPEGEDVSYFTHKDFSIKWENLHREGPAADQWRTSALTDTAYASTQVASYLAAALYPEQQDAQRIFFTKGLYTSLLRRDWQLQDAKLGKIRDDHRHHAVDAVAIALTTPERLQELAVKAREWEQLHSQGADTKYPPIAPPAPWKTVEDFRNAVMAGVHTLVVAHRPSMRRLAGAFHQDTAYGPVLDNPKRYTVRVAASDLKPGYLKLSQKQQDDLAQGRRPRPADDPPIDSNSYLVRDLALRLQLRKCLKDRGLDPDAFTEKQLRALLQAGPLRMASGVPIKSAVCLKTIENPVVFPRYNRDIQTGRKVADSDPRSRRIYIGGNNHHAEIRENAKGQWSVKVVTMIEAARRVRAAKDPRARSAVDRSDTKEGRFIMSLSIGETVHMRHPVTNEPGYFTVFKIDPNGAIHVTHHWDARPSKPTEDQEAREDIRLSPSKFKNLGPSDGIPPYKVHVNPLGEPRRLEGD

SEQ ID NO: 8628 - protein, 1405 aa, synthetic construct
  REGION 1..1405: note = Synthetic
MNITLGIDLGTNSIGWAIRNTSEKENQIIKKGVLTFDKGVGEEKGIEFPKVKKRTESRGKRRNYQAEKYRKWELLQLLIKNDLCPLTIEELNQWRKYTKGQSRQYPSSKAFIEWLRFDFNGDGKPDFHLFSKDNHESYYIFRTKAVCGNADSKKVFKDNPQILGRVFYQLVQRRGFKGRDEEEAKTMLEGSKKTGTPGRNEISTYLNKYKSLGAALYHYQKKTKQNRIRNRYNLRKDYENELKLICDAHGVDEDFYKKLWKSIIWQRPLRTQKGLIGICTYEKNKKRAPVSHPLYEEYRTWVFINNLKIKQPEGWKLENYLLQHIYPLFYKASNDFKLSTIINKLRKDGAKMESRFKDRPKTKVLSAKLLNSFQELLGENWQEEYNWNTINERPEQPIKKTKKKYSFEDVWHVLFTFDSQDKLEEFGKEKLNLSNDKVEKFSKIKLQQGYATLSLSAIKKVLPYLRKGIIYSKAVYLANIHKVLGTHDITDDSIEYFSSEIDKILVDTDNEKLLNNVVNAIIQDESIKFDSYAIEDDRALDESEKRLVNEKLNQVIGDKTWSRYTQDEKEFAITYVSEKFREFLKNRKTGFLQQPRLHDRIFNWLQETYQVPDENKKYLWHPSEQEKYSNAEYYHEIKAKGNTVYIKDSDLENFLYKNPNAEQEAISLKLLGSPEPLSKGFKNPMALKTLHKLRHLLNYLLQTNQIDEDTRIVVEIARELNDANKRKAIEKWQAERERENNNFKKTIEEINKECDTSYDTNDMSLIHKIRLWNEQNKICIYTGNSINVCDLFSGNKYDFEHTIPASMCFDNELKNLTIADAIYNRTVKKKQIPTQLPNYSETVDFKGVQYSAIEPRLQFIKDKLEHYENLFDDWLKKTKYASTKEYKDYCIQMRHYNRFNRDYWKKKLETFTITEYKAGWKNSQLRDTQTMTKYALPYLKTVFKKVEVQKGNVVNAFKEVYNIKLSSDKKDRTKHSHHAIDAAILTLIPKFSVRDSIIEKYNEEKDSHTGKTYHERPRNWENFKPSYILDFEKETLINNQLEFTALTPSVKKVRKRGRIQYATFIDENGKKHFKLDVYGNKIPLIAKGDTVRGQLHGESFYGAIKQPKRDEENKVLFDEKSKMLLEDTISLVIRKDLVFKKDANSNGFKTLEEIKNKIVDKSVGEIIEEQVKLEISAGGSLKSALDKGIWMLNKKGEKINRIRRIRCFESLKYETAAKVHEHAYKSDKDYKQTTLAQNGENVFCLFYKGIVNGKEERTIEIIGIFDLVKLKIRSEKDIYKIPLFNTSEVGRGKKKSTIQLYHILKSGQKVLFYKDGMEELKELNKMELSQRLYKAYQFESDGRIKLKHHLIAGSNTDIKKKYKEVSLFKFDGYQPLLRLRQKNWDFAIEHKDFEMELDGSINWKF

SEQ ID NO: 8629 - protein, 1387 aa, synthetic construct
  REGION 1..1387: note = Synthetic
MDKILGLDLGTNSIGWAIRDTSESDNQIIDKGVLTFEKGVGEGKSGEFPLVQKRTESRGKRRNYQAEKYRKWDLLQTLIEHKMAPLSLDELDEWRKYTKGIARKYPQSEQFLEWLRFDFDGDGKPDFERLGYSRHENHYLFRMLAASDEQRNKKIFQGNPHILGRVLYHLVQRRGFRGRDEEEAKTIMHGSKDSGTVGVDEIKPYLDQYKTLGAALYHINKDKAARIRKRYNLRTDFEAELREICRVQGLGELFFKKLHKAIIWQRPLRSQKGLIGYCTFEAPVKNEQNKYIKAGKKRCPISHPFYEEYRTWVFINNLKIELPTDIIREQYLQDSIYPVFYNKSKDFKLSSISKELRKAGGQIKAKFPDDTKVISCALLNAFKNILGNNWKEQYSWDELLNDRPKGNPYSIEDIWHVLFTFDSSEKLKEFAVQKLDLGENKAEEFSKIKLQQGYATLSLSAIKKLLPFLRQGIIYSEAVYLANMHKVLGQEKLSGQDVEHFTQIFREINTEQKDHILAGTVINSLISDQLNSEQRWGMDENYDLDDVDSKDIVKKIIDITGAESWNKKSDQERNRLTGKISTSYLDFLRKPINAKKDKIFIKAPRLHDKIFDKLQEDYSLPDRNIRDLWHPSEQETYENAKEVNGVRLLSDPKPISNGFKNPMALKTMYKLRHLINYLLQENKIDDDTRIVIEIARELNDANKRKAIERWQREKERENQEYIKKMQEDCGVPINAIKKDMVDKYRLWLEQNRQCLYTGNFINCTELFSSNAKYDFEHTIPASMSFDNELKNLTIADGVYNKQIKGKKIPTELPNYEQDRAGYTAIRPRLNFMFEKVEHLEKLLAEWKNKSKFASTKDIKDACIQHKHMIKFDLDYWRKKLDTFTCTEYKAGWRNSQLRDTQIVTKYALPYLKTVFNKVEVQKGSVTNDFKEIYSVKFRNEVKSRDKHSHHAIDAAILTLIPPSAIRDKILFKYNEVKDNNYNGTYHEPVRHWPNFNSEHLLSFENNILINFQPQYRTLTATFKKLRKRGKQQFVKQAVDGKKQLKLDGTGNKIPLIAKGDTIRGQLHKETFFAAIKQPVYDEKDGKFIPQTDGEGNFIFQENEKRKDELFFVAKVPITSFTKEEDFEVVVDPNLKQFMKLEIRRRLSTGKSFAEAIEKIYAFNKEKDKNGNDILPIRHIRCKVKSGGGGFVNNPVTVKTNATSPPSKKEYKQGLYALNGETVVSAFYQSTVDEEIIRIIQPYSIIEIAKANAKSLDDAVNSKIEITIKKEKHLIPLYSVLKIKQKVLFYEEDKDELKVIDVKELSKRMYLITKFEDGRICFKHHLNSMSEDELKNEMKRLGLADVGSSSFNFDYPIPKLRLSKANFNFIIENKHFEMRPDGSIIWLY

SEQ ID NO: 8630 - protein, 1368 aa, synthetic construct
  REGION 1..1368: note = Synthetic
MEKILGLDLGTNSIGWAIREVDTELENQIVDKGVLTFDKGVGEGKAGEFPLVQRRTESRHKRRNYQAEKYRKWNLLQCLITNNLCPLTIEELNEWKHYKKGKGRKYPQSKKFIDWLRFDFNGDGKPDFEETGFTKNESYYVFRAIAISEKEAHKEIFQKNPQILGRIFYQLVQRRGFKGRDEEEAQTMLKGSKDGSIKGRNDIASYLEQHKTLGAALYHLQKEKKERIRKRYNLRSDYENELKQICRTQNIADHIYKQLWKAIVWQRPLRSQKGLVGICTFEKNKNRCPISHPLYEEYRTWAFINNLKISVPEGIKKETYLQDKIYPLFYNASSDFKLSSIYKQLKKDGASSDANFKDDTKVISARLLNLFEKLLGNNWKKEFGWNESLNNQSKKCSYSVEDIWHVLFTFDSIEKLNEFAHVKLNLNEADAEKFSKIKLQQGYATLSLSAIKKILPWLRKGFVYSEAVYLANLPKVFGAKDISTELIESFEELYSKLRGEHENEKILNSCVNDLIRQELNSDNRYRIEMDRDLDAEELKTVEDKLIQVFGIKTWEEKQEVGKHFAKNYVAHYYKEFLQKPFYGKKDELFLSVPNLHQRLIKHLADTYQLTDKQLSNLWHPSEQEIYPNAKEKQLENGGSIKVLGEPQPISRGFKNPMALKTMHKLKRLVNYLLESNKIDDETRVVVEIARELNDANKRKAIEKWQRAREKENEGFKEIIDEINKECDTNYNREDKTLIDKIRLWKEQNMYCLYTGKMIPQSDLFNGIKYDNEHTIPASMSFDNELKNLTIADTHYNREIKKKNIPYDCPNYWEDVTIDGIVYKPIIQNLEMVFGKRSVTIKKIRGKEKEFVTFERIEHLSDLYEEWKKKSSDTKEIKDAIIQKRHLIKMELDYWRKKLYTFTTKEYKAGWRNSQLRDTQIITKYALPYLKTVFKKTEVQKGSVTADFRKIYKIIDKSEKKDRSTHSHHAIDAAVLTLIPPAAIRDKILLAYNEEIDNKTGFIYHERPRNWKNFTASHLLSIADDVLINFQPQHRTLTPTYKNVRKRGKQQFVKFKDSNGKWHFKTDEQNKKIPLIAKGDSIRGQLHKESFFGAIKKNGEMLLVERYPIAAFTSINDCKNIVDDAVRKIVQDELEKRVNSGLSFDRAKLDPIPFPTENALIKKVRCKVAAGRGYLSPEKALPVHRHTYLSKHEYKQTTYAQNDENTLCLYYELETDKRIERAFRIVGLFELAQLNRRNYSSIKHDFAYNKINTGKGKNKIQLPLACIVKNGMKVIGYKENSEEIKDLSKTEINKRLFRVYKFNDVASTKYIYLQHHNEARPDKELGDGDTILQVEKYQPRLKLTAERFSFLIEGKHFEIKPDGTISLKY

SEQ ID NO: 8631 - protein, 1359 aa, synthetic construct
  REGION 1..1359: note = Synthetic
MEKILGLDLGTNSVGWAIREVNNELENQIIEKGVLTFDKGVAEDKSGEHPMVQKRTEARGKRRNYQAEKYRKWVLLECLINEGMCPLSIDELNQWRHYSKGSGRRYPQSEKFISWLRFDFDGDGKPDFERLGHNKHESFYLFRKLIVDSSKVEIFKREPQIIGRVLYQLVQRRGYNDGQNIDENEKDELSKTIMKGGGDAGAVGVNDILPYLEKYRTLGAALYHIQQDKNLRIRKRYNLRSHYAKELNEICNVQGLEHLYKELWSAIIWQRPLRSQKGLVGVCTFEKNKRRCPISHPLYEEFRTWVFINNLKIKPVVKNDISINSIDIKEALHKIVYPQFFKAAPNFMLSSIKKVLDKVGFEITAKLPEDTKVTSLSFLYKMKEVFGDEWELIGDWDNVLTDKDKTHQYNIEDLWHLHFTKTTNKKTGEEPFDFLKRFAKEKLVINDEQKAEIFAKIRLQQGYATLSISAIRKILPFLHQGFIYSEAVYLANLPKVLGLKSLSDNEIESYSQFIRKIIADYKYDQKKVAIINSLIAIYFEDILNFEANKKDLISRTISENYGEFYWNLLPTQKAVNVLNDITDEINKFLSKPKWKAENHFIKTGRLHEKIFTALLNEKGVAANNIKYLWHPSEQETYLPALAKDGKYYLGSPEPISKGFKNPMALKTMHKLKKLINYLIQTGKIDKDTRIVIEIARELNDANKRKAIERWQRDREKENDKYKVQIVEINKECKTNFNENDKNLIDKIRLWEEQKRQCIYTGKTIGLCDILDGSKYDFEHSIPSSMSFDNELKNLTIADKTYNQQIKGKKLPSECPNYESDYTFNGVVYPSILLTMQIMFGKMTETEKKVKGKTIKKRSFEKIEHLENLLEEWRAKKSDDKGIKDNIIQKRHLIRIELDYWRKKLQTFTATVYKAGWRNSQLRDTQTITKYALPYLKTVFDKVEVQKGNITSDFRKIYKIQPKFEKKERTKHSHHAIDAAVLTLIPSSAIRDKILLNYNEAKENKQDYHEVPKQWKNFKAKFILDIEDNVLINYQAQHRTLTSTYKTVRKRGKVEFVFDKEGNKIPKVAKGDSIRGQLHKESFFGAIKNKGELNLVERYPISSFTSINDCKHIVDDKVKELVQNELQKRMEEGLSFDKAKLEPIPFHKGNEVIKKVRCKVAAGRGYLTPAKALEIHKHDSKSKHHYKEFIYAQNDQNTYCLYYELLNDKKIERAFRIVGLFELSKLGLKTENDLFNDTYYNNLEVGKGKNIQNAFLHSIIKVGLKVIFYKESIDELKELSNELLIRRIFRVYKFNEMGTPNLFLQNHIEARRNELLDDGDTEFNQDKYQYRLKIKADKFKCAIEHKDFEVKLDGQIVWLE

SEQ ID NO: 8632 - protein, 1344 aa, synthetic construct
  REGION 1..1344: note = Synthetic
MNKILGLDLGTNSIGWAIRDATEPGNQIIDKGILTFEKGVGEEKGVEFPLVKKRTESRSKRRHYQAEKYRKWTLLQTLIEHNMCPLTIEELDQWRKYTKGQSRKYPQSPDFINWLRFDFDGDGKPDFERLGFSKHENHYLFRMLAVSDNSAHKNIFTDNPHLLGRIFYHLVQRRGFRGRDDEEARTILQGSKDGKVAGAEAISPLIHQYQTLGAALYHLQKDKGERVRKRYNLRADYAHELQLICQVQNIPDTIYKRLEKAIVWQRPLRSQKGLVGICTFEQNKPRCPVSHPFYEEYRIWININNLKIRLPDGIDKQTYIREKIYPIFYRKDRDFKLTVILKELRKVGGSLGSKFKDDTKIPSATLLNAFKEILGEDWKNLYGWDAALQNQPKSIPYSFDDIWHVLFTFDNREKLQLFSKEKLKLDEENAEKFSKIKLQQGYATLSISAIRKILPYLKEGYLYSHAIYLANLHRVLGKNTLLPSDAQAFSVALRGIIDQHRSEQSWIAAVNGLISDQLNGDARFGMDPVYQLDRDDMNDIERKLEEELGEYSWKKKSKEEKNAAINFVAEKYLSFLRRPVQYSKEPVYSKLPRLHDRILNYLRETYDVQPKNEKYLWHPSEQESYPAAKYMNGVPVLGDPMPISRGFKNPMALKTLHQLKKLLNHLLKIGKIDEDTRIVVEIARELNDANRRKAIERWQRDRERENDEYRKKIEENPELKGLFLDVKNKDIIDKYRLWVEQNKRCLYTGNIINVYDLFTGKFDFEHTIPASVSFDNELKNLTIADGKYNKQIKKKLFPTQLPNYDREATIDGVIYSAIKPRLESIEKKVEELEALHEEWTNKTRFASTKEIKDACIQRRHIISFDLDYWRKKLNSFTVTEYKAGWKNSQLRDTQIITKYALPYLKTVFRKVEVEKGSIVSDFRKIYNIQPKAEKKERTRHSHHAIDAAVLTLIPSAAIRDRILGKFNELKDQNVNLIYHEPVTNWKDFTAAHILSIEEDVLNNFQPKQRTLMQTYKNVRKRGTKQFVKEKTPEGKWQYKLDAKGQRIRLVAKGDNIRGQLHKESFFGAIMLDGEKWLVERYPVSSFTNIKDCRHIVDNTVRQIVQEALEKRLGEGMPFDKAKLDPIPFPGGKEVIRKVRCKVAAGAGYLTPKKALEVNQHDFLSKNDYKRSVYAQNEENTLCLFYEGVVNNKEERAFRVVGLFDLSQLKLKKIEDIRSEKYYQAVEAGRGKNKAEIPLSHIITVGIKIIPFKNSKEELKELSKRDLLRRVYRVYKFNEPAPSTVYVYMQNHLEARPNDELGNGEKDLNLEIYQPRIFLNATKFTCVIEGRDFSIDLDGTIRWLF

SEQ ID NO: 8633 - protein, 1344 aa, synthetic construct
  REGION 1..1344: note = Synthetic
MSKILGLDLGTNSIGWAIRDTSEPGNQIIDKGVLTFEKGVGEEKGVEFPLVKKRTESRSKRRHYQAEKYRKWTLLQTLIENGMCPLTIEELDQWRKYTKGHGRKYPQSPAFINWLRFDFDGDGKPDFERLGFSKHENHYLFRMLAVSADPDHKDIFKNNQHLLGRVFYHLVQRRGFRGRDDEEARTILQGSKDGKVAGAEVISPLISQYKTLGAALYHLHKDKSERIRKRYNLRTDYAHELQQICQAQNVAEPVYKRLEKSIVWQRPLRSQKGLVGICTFEQNKPRCPVSHPFYEEYRVWININNLKIQLPDGIDKHTYIQEKIYPLFYRKDRDFKLTVILKELRKVGGSLGSRFKDDTKIPSATLLNTFKEFLGDNWKDQYGWDLALENQSKTAPYSFEDIWHVLFTFDDREKLAQFAKEKLGLDEEKAEKFAKIKLQQGYATLSISAIRKILPFLKGGYLYSHAIYLANLHKVLGKNTLSFSDSQMFSTALKDIIDQHRSEQSWVAVINGLISDQLNGDTRFGMDPAYQLDKDDMNDIQKKLEEELGEYSWKRKSEEEKNTAINFIAEKYLSFLRRPVQYSKEPVYTRLPRLHDRILSYLRETYDIPVKNEKYLWHPSEQESYPAAKYENGIPVLGDPMPISRGFKNPMALKTLHQLKKLLNHLLKAGKIDEDTRVVVEIARELNDANKRKAIERWQRDREKENDEYRKRIEEDPELKGLLLDVKNKDVIDKYRLWIEQNKTCLYTGNIINLYDLFTGKFDFEHTIPASISFDNELKNLTIADGTYNKQIKKKLFPTQLPNYDKEATVDGIVYSAIKPRLEFIVKKVEELEALQEEWTNKTRFASTKEIKDACIQRRHIISFDLGYWRQKLNSFTLTEYKAGWKNSQLRDTQIITKYALPYLKTVFRKVEVEKGSVVSDFRKIYSIQPKAEKKARTRHSHHAIDAAVLTLIPPAAIRDRILAKFNELKDQNINLIYHEPVTNWKDFTAAHILSIEEGVLNNFQPQQRTLTQTYKNVRKRGAKQFVKEKLADGKWQYKLDGKGQRIPLVAKGDNIRGQLHKESFFGAIKLDGEKWLVERYPVSSFTTIKDCRHIVDPKVREIVQEALEKRMSEGMPFDKAKLDPIPFPGGKEVIWKVRCKVAAGVGYLTPKKALEINRHDFLSKHDYKHSVYAQNEENTLCLFYEGVVNGKDERAFKVVGLFELAQLKLKKIDHIKSEKYYQTVEAGRGKNKAEIPLSYIITVGIKVIPFKNSKDELKDLSEKELLRRIYRVYKFNEPAPSTVYIYMQNHLEARPNDELGNGEKDLNLERYQPRVFLNAAKFTCAIEGRDFSIDLDGTIRWLF

SEQ ID NO: 8634 - protein, 1441 aa, synthetic construct
  REGION 1..1441: note = Synthetic
MEKILGLDLGTNSIGWAIREINTGLENQIIDKGVLTFDKGVAEDKSGEHPMVQKRTEIRGKRRNYQGEKYRKWELLKCLIENGMCPLTIDELNDWKQYRKGIGRKYPQRKEFINWLRFDFDGDGKPDFDRLGFDKHESYYLFRKLIVDESKIEIFKKEPQIIGRVLYQLVQRRGYNDGNDIDETEMEELSKTIMKESNESGAAGADEIRPYIEKYVTLGAALYQIQKEKNVRIRKRYNLRSDYEREVKEICRVQGLERLYKSFWRAIIWQRPLRSQKGLVGICTFERNKRRCPISHPLYEEYRTWVFINNLKITPILQNNVLINSIPIEDALKTIVYPQFYKASTDFKLSNIIKVLKNEGFEVTARFPSDTKVLSIGFLYKMKELFGDDWENIIGWNDLLKDFPKKVKYNIEDLWHLLFTKTDNKKTGEKSFDIVKRFGIQKLQLTEEKAKVFAKIRLQQGYATLSLNAIKKILPYLQKGFIYSEAIYLANLPKVMGRKLEESDIETCILLIREVIRHDRYDRKKAGIVNSVIASYFEDKKNFEFNKSSIIEEQIIETYGKESWNKLSVQIQCNINDDIRQVIEKFLQEPKQKPEDHYLKAGRLHDKIFNILRDKYSLPTENIKYLWHPSEQETYEDAKYYQEFHLNNKSYYIQENKVGNFLKKNPDATKGKFYDKLLGTPDPISKGFKNPMALKTLFKLKHLINYLIEVGKINDNTRIVIELARELNDSNKRKAIEKRQREREKENETYKKQIEEINRECKTAFDPNNKDLIDKIRLWNEQNKICVYTGKTIGLCEILNGGKYDFEHSIPASMSFDNELKNLTIADKTYNQQIKGKRLPTECPNYDNNTTINGITYPSILSTMQTMFGKMTEKPKKTKGGIVIIRSFEKVEELEKQVTSWLNETKKAQTKERKDYCIQQRHYYKMELDYWRYKLQAFTIEEYKSGWRNSQLRDTQTITKYAVPFLKTIFLKVDVQKGNITSDFRKIYKIQPRLEKKERTKHSHHAIDAAVLTLIPPAAIRDKILLDFNEANEKNQPYHVKPRQWDNFHQQYVIGIEDEVLINYQAQHRTLTPTFKRVRKRGKIQYVRKKISYGKWQIKLNHEGKKISLKAKGDSIRGQLHKESLFGAIKMPEYIEIHGKFIPKNDSNGNFIFQKNEKRGDELFIVDREIDLTKFKTLEDFDIVIDPNLRAYLKKEIQSRINKGFTFSQSIIQPIYAFGKIKDKNGNSIRPIRHIRVRAKGSGSFVQAPSIIRSRNNFISEKEYKNFDYAINGEIPVCAIYQTIMNHRLVREIKAFSILEVSKSNINKKIISSVEQNIEKKVGKSKVLVPLLHILLPGIRVIFFKNELAELKDLNFKEIINRLYVVSSFEEGKIYFKHHLCSMEESEIKSHLRNIGISEKGASSLNFEHPFPKLRLSQGALNFAIEGKHFVTKPDGTIIWL

SEQ ID NO: 8635 - protein, 1400 aa, synthetic construct
  REGION 1..1400: note = Synthetic
MEKIIGIDLGTNSIGWAIRDTHEQENQIVDKGVLTFEKGVGEGKSGEFPLVQKRTESRSKRRNYQAEKYRKWALLKTLIEQKMCPLSIEELDEWRKYTKGVGRKYPQSEKFIQWLRFDFDGDGKPDFETFGFSKHENHYLFRMLAVSEEEQHNKIFENNPHILGRVLYHLVQRRGYRGRDDEGEEAKTIMKGSNKTGTTGVEVITPLIKEYKTLGAALYHLSKDKNERIRKRYNLRTDYEYELKAICSVQKINDLIYKQLWKAIVWQRPLRSQKGLVGYCTLEAPAKNESNKFIKAGKKRCPVSHPFYEEFRTWVFINNLKIHLPENVDKAIFLKENIYPLFYKVSKDFKLSSINKELKKVGGYIKSKHSKGEGKNKEDDTKVISCTLLNSLKDLLGSNWKDEYGWIEGLSSQSKKCPYSFEDIWHILFTFDSKEKLKQFAIEKLRLDEEEAEKFSKIKLQQGYATLSLSAIKKILPYLYQGFIYSEAVYLANLHKVLGAKEVTQDMIDLFSEEVRKIITEQNESKQLSNVINNLISDQLNSDQRYGMDANYELDADDKKDIEIKLQSVFGAKTWEEKEVADKQKSFEFVANNYLTFLRKSINAKKDNLFIRSARLHDKIFDYLKNTYDVPDENKKYLWHPSEQETYEEAQIKNGKPMLGKPQPISNGFKNPMALKTLHKLKGLMNYLLQTNKIDEDTRVVIEIARELNDANRRKAIEKYQRDREKENDGYKKRIEEIAKEYNLHLDINNKDIIDKYRLWIEQNETCLYTGKIIGCKEIFDGSLYDYEHTIPASMSFDNELKNLTIANGIYNKQIKQNKLPTQLPNYYEDAVINEVTYTAIKPRLEFIEIKVTELEKQLEDWKYRAKVASTKDRKDYCIQQRHLIRFDLDYWRKKIDTFTITEYKAGWRNSQLRDTQIVTKFALPYLKTVFKKVEVQKGSVTSAFREIYKIQPRQEKKDRTKHSHHAVDAAVLTLIPPAAIRDKILLRYNEEKDKNTNNTYHETPRQWGSFSQQHIISLEDEILINFQAQHRTLTNTKKNVRKRGKQQFVKEKTQDGSWHYKLDEDGNKIPLIAQGDTIRGQLHEESFMTLIKQPEYLLVNNKYIPSTDGKGNFIFQQKNEVAELFVVKKVLISELDTIDKLKKIIDLNLKDYLSRTIKERIDSGRTYQQAILEPIWAYGKSKDKNGNAINPIRHLRCRVAKAAGFLSKEKTLDIRKNEFVSKYSHKRDVLAGNDEMVICLFYQIENSKSFRLISRFELAALKIKNLNELYSQNEYNQILKGSKKLMLPLTYIIQSGCKVFLFDDKVNSVDDLKQLGKKELSRRLFIINNYNIPAGNTIYIYLINHIDSRTKDILQKEEVKNIDTTKYQAKLALTADKFNCAIEGKDFEMKPDGQIKWFN

SEQ ID NO: 8636 - protein, 1412 aa, synthetic construct
  REGION 1..1412: note = Synthetic
MNTILGLDLGTNSIGWAIRDTSENKNQIIKKGVLTFDKGVGEEKGIEFPKVKKRTESRGKRRNYQAEKYRKWELLEFLIENKMCPLTLIELDQWRKYTKGQPRQYPKTKEFIEWLRFDFNGDGKPDFHLFSRDKHESHYIFRTMAISNIDEAKKVFSENPHILGRVFYQLVQRRGFKGRDEEEAKTMLEGSKKTGTSGRNEIEDFIKEYKSLGAALYHFQKKTGNRIRERYNLRRDYENELKLICKAQDLDQNFYHKIQKAIIWQRPLRTQKGLIGICTYEKNKKRAAVSHPLYEEYRTWVFINNLKIKQPESWELEEYLQQKIYPLFYRASNDFKLSTIINQIKKDGAKMESKFRDRPKTKVLSAKLLNSFQEFLGDNWKEEYEWNSINKRPSKPTKKNNNNYSFEDIWHILFTFDSQEKLNEFGSTKLNLNDEEALRFSKIKLQQGYATLSLSAIKKIIPYLRKGIIYSKAVYLANIHKVLGKEEITDESIEYFLSEIDKVIDETDTEKRLNNVVNSLIQDESIKFDSYTIEDNRQLDASEKRLVNQKLLDELGSKTWEEYKQEDKEFATQFVSEKFRKYLKNRQTGFLEQPRLHDRIFHWLQETYDIPNGNKKYLWHPSEQEKYPNAEEYHEIELKGDIVYIKDSELATFFYQNPSAEQEAISLKLLGSPEPISKGFKNPMALKTLYNLRHLLNYLLQTNQIDEDTRIVVEIARELNDANKRKAIEKWQAERERENIVYKETIDEINKECNTNFDTHNMTLIHKIRLWEEQNRICLYTGNPIAMCDLLDGNKYDFEHTIPASLSFDNELKNLTISETSFNRTIKKKQIPTQLPNYKETVTVNGKQYAAIEPRIQFLKDKVDHYENLFDDWLKKTKYASTKEYKDYCIQMRHYIKFDLDYWRKKLDTFTIEEYKAGWKNSQLRDTQTMTKYALPYLKTVFKKVEVQKGNVVNAFKEIYSIKLSSERKDRSKHSHHAIDAAILTLIPKFSLRDSVLEKYNEEKDNQTGKTYHEEPKDWDNFKPSYILDIEKEILINNQVDFKTLTPTFKKVRKRGKIQYVTFTDENGKKNFKLDANDNKIPIVAKGDSIRGQLHGESFYGAIKQPKRDEDNKILFDDEGKMILDETISLVIRKDLIYKKDSNSSGFTSIKEIKEKIVDKAVGEIIEKQVNTEIANGGNLKSALEKGIWMLNKKGEKVNKIRHIRCFESLKYETAAKVHEHDFESGKEYKRTTLAQNGENVFCLFYKGKVAGKEERTIDIIGIFDLAKMGIRDEEDLYGIPLFGTTEVGRGKKKTTIPLYHILKAGQKVLFYKDEMVELKELSQAELSERLYKTYQFEKGKGGIKIKLKHHLIAGANTEISKNLDKSYKEANPFSFDGPYQPLLRLSSSNWDFAIEGKDFAMNLDGSIKFNF

SEQ ID NO: 8637 - protein, 1379 aa, synthetic construct
  REGION 1..1379: note = Synthetic
MEKILGVDLGTNSIGWAIRDLNENENQIIDKGVLTFDKGVAEDKSGEHPMVQKRTDARGIRRNYQAEKYRKWELLKILIENKMCPLSIDELNEWRHYSKPFGRKYPKSEKFIQWLRFDFDGDGKTDFERFGFSKHESYYLFRSLIVDETKKEIFKKEPYIIGRILYLLVQRRGYNDGSEIDENEKNELSKTIMKGGGDAGALGANEIEPFIEKYKTLGAALYHIQKEQKVRIRKRYNLRSRYEAELKEICRVQNIEHLYKLFWKSIIWQRPLRGQKGLVGICTFEQNKRRCPISHPLYEEYRTWVFINNLKIKPIDDCDTGNKKIQEILSSIVYPEFYRASPDFKLSVIKKKLEKVGYFITAKFPDDTKVNTVQFLYRIQEIFGDEWKDKLGWQNLIENKPKDLDCNYNIEDLWHLHFVKTTNKNTGETGTDFLNRFAVEKLSLNEDEAKSFSKIRLQQGYATLSVNAIKKIVPYLQKGFIYSEAIYMANLPKVLGRNEITETDIQHFSQEVSAIIQNDKLQNKYIQTVNELISDQLNAEADTRFGMDESYQLDESDLTDIENKLLLVFGHVSWNKLSNIERQDALNFVSNKYLAFLQKKIYSKNVFEKPKRLHDKIFNWISETYGIKLENKKYLWHPSEQETYKKAIEKNGLKYLGSPEPISKGFKNPMALKTLHKLKKLINYLIETKKIDEETRIVIEIARELNDTNKRKAIERWQREREAQNVTYRKQIIEINKECKTSFDENDKNLIDKIRLWEEQNRRCIYTGKSIGLCDILDGSKYDYEHSIPASMSFDNELKNLTIADKTYNQQIKGKKLPTECPNYDIEYVYNGVKYEPIINTLQSIFGKLIIEEKTIKGKKVTKSNFKKIIDLEKIYQEWKDKTSEDKEIRDNIIIKRHYLKMELDYWRYKLQTFTITEYKAGWRNSQLRDTQTITKYALPFLKTVFKKVEVQKGNITSDFRKIFKIQPRLEKKERTKHSHHAIDAAVLTLIPPATIRDKILAKYNEANEINTGYHETPRQWTNFKTSHIINIENEILINYLPEHRTLIATKKNVRKRGEVQFVKEKSNDGKWHYKIDEKGKKIPLVAKGDSIRGQLHKDSFFGAIKSGKEIILVERYPISSFTNINDCKHIVDDKVRELVQNELQKRMDSGLSFDKAKLEPVPFHKGNEVIKKVRCKVAAGRGYLTTERAIAIHQHDFKSKKEYKHHIYAQNDTNTFCLYYENTIDKKINRAFRIMGLFELAQLSIKNENELLNEPYYNNIITGKGKNTTEIPLVHILKVGVKCIFYDETLEELKDLNHKIILGRLFRIYKFNEIGVTRYIYLQNHLEARKNDELGNGDTEFKKDKYHSRLMIGADKFNCAIENRDFEIKLDGTINWLF

SEQ ID NO: 8638 - protein, 1357 aa, synthetic construct
  REGION 1..1357: note = Synthetic
MEKILGLDLGTNSIGWAIREINSELENQIIDKGVLTFDKGVAEDKSGEHPMVQKRTESRGKRRNYQAEKYRKWELLKCLIENKMCPLSIKELNAWRQYKKGIGRKYPQNERFINWLRFDFDADGKPDFERFGFSKHESYYLFRALIVDENKVEIFKNEPHIIGRVLYQLVQRRGYNDGQNIDENEKNELSKTIMKGGGDSGAVGANEIQPYIIKYKTLGAALYQIQKEQNVRIRKRYNLRSDYEKEIKEICHVQGLENLYKDFWRAIIWQRPLRSQKGLVGVCTFEQNKRRCPISHPLYEEYRTWVFINNLKIKPIAEDETKTNEEQNRQLLSLLNDNVYPQFFKAADFKLSSIVKELKKKGFEITARFPDDTKVINLSFLYKMKEIFGERWKEVTEWDNLLNEKKEKQKYNIEDLWHLHFVKKDNKETGETAFDFLKRFGIERLKLEDVKAEIFAKTRLQQGYATLSLSAIKKILPYLRQGFIYSEAIYLANLHKVMGVAHVSDDIVKHFSEEVKRIIKENSFEKKLNKAANELISDQLNGENRFGMNSNYQLDEDDRKDIEQKLVETFGKYSWNNLDNKEKIIATTTISNKYLTFLQKRIHAKNVFEKPERLHDKIFNWIKDTYHVPESNIQYLWHPSEQETYSRAIEKDGKHYLGTPEPISKGFKNPMALKTLYKLKKLINYLISVGKIDEDTRVVIEIARELNDTNKRKAIERWQRAKEKENDTYKKTIDEINKESKTDFNREDKNIIDKIRLWEEQMRTCIYTGKTIGLCDVLNGVKYDYEHSIPASMSFDNELKNLTIADSYYNREIKKKKLPFECPNYENDALGFSAILPRLDFIRNKIEHYEPLYDRYKYFAKNAQTKDSKDRNIVDKHIAKMHLDYWSYKLITFTTTEYKEGWRNSQLRDTQTITKYALPFLKTVFNKVDVQKGSITADFRKIFKIQNRLEKKERTKHSHHAIDAAVLTLIPPAAIRDKILLRYNEANENKQGYHEKPKQWNNFHQQHIIGIEDEVLINYQADHRTLTPTFKTVRKRGKVQFVKVKWADGKWQYKLDKDGDKIPLQAKGDSIRGQLHKESYFGAIKNKGELNLVERYPIDAFAKIDDCKNIVDDAVRKIVKEVLEARMSEGLSFEKAKLNPIPFPTGKAIIKKVRCKVAAGRGYLTPEKAIEIQKHNFQSKHNYKQHIYAQNNQNTYCLFYESDFENKVERAFRIIGLFDLSKLGIKNEKELFQDNYYNKIETRKGNKKKEIPLIHILKVGTKIIFYKEHIEELKELSNKELLKRLFRIYKFNETGAPLIFLRNQIEARSDDKLANEETLFKSEIYQARLRLVANNFTCAVENKHFEITIDGEINWKV

SEQ ID NO: 8639 - protein, 1407 aa, synthetic construct
  REGION 1..1407: note = Synthetic
MEKILGIDLGTNSIGWAIRDTSETGNQIIDKGVLTFDKGVAEVKGIEAPKVQKRTDARRIRRNYQSEKYRKWSLLECLIENKMCPLTIDELNNWRHYKKGVGRKYPMSEKFIQWLRFDFDGDGKPDFERLGYSKHESYYLFRSLIVDETKKEIFKTEPQIIGRVLSQMVQRRGYNDGSEIDDNEKSELSKTIMKGGGDAGALGANEIEPYIEKYKTLGAALYQIQKETKARIRKRYNLRSRFEAEIKEICRVQELGHLYKKIWTSIIWQRPLRSQKGLVGLCTFENNKSRCPISHPFYEEYRTWVFINNLKIKPINNSSNIIDLNVVLHSIVYPEFFKAAPDFKLSTIIDKLKKVGYEIGAKFPEDTKALSMSFNYKMKEIFGDNWKEKLGWNDIINNVKKNINYKYNIEDLWHLHFVKTTNKNTGETPFDFLKRFSIEKLNLKESAESFAKIRLQQGYATLSINAIKKILPYLQKGFIYSEAVYLANLPEVLGIKNVTEDTVIHFAEEVRKILKENYKEKKYLQVVNELINDQLNADQRFGMDANYQLDQDDYNDINKKLEDVFGKTSWQSLIEEEQHTALDFVSNKYLVFLQKKIFSKNVFEKSERLHDKIFNWISETYNVPAERIKYLWHPSEQETYAQAKFYNEIILGNKTLYIEEKNTVSFLSKNTNAIRGDFNGKLLGSPEPISKGFKNPMALKTLHKLKKLINYLLETKKIDEDTRIIIEIARELNDANKREAIKRWQREREAENDKYKKQIIEINTECNTQLDVEDKNLIDKIRLWEEQNRLCIYTGKTIGLCDVLNGSKYDYEHTIPASMSFDNEMKNLTIADKTYNQQIKGKKLPTECPNYDTEYTHNGITYKSILDTMQSIFGRLVEEEIKTKYGKKIKLKFNKIIELETKVDRFIYFSKTITTKEQKDKNIVDKHIAKMELDYWRYKLQTFTSTEYKAGWRNSQLRDTQTITKYALPYLKTIFKKVEVQKGNITADFRKIYKVQPRLEKKDRTKHSHHAIDAVVLTLIPPPAVRDKILLRYNEAKENNIGYHETPRQWSNFSTNHILSIEDEIIINYLPEHRTLIPTEKIVRKRGKIQFVKEKLDTNKWQYKLNEQGKKIPIVAKGDSIRGQLHKLSNFGAINNGEAIILVERYPISSFTSITDCKHIVDAKVKELVQTELQRRMDNGLSFDKAKLEPIPFHKGNEVIKKVRCKVAAGRGYLTTEKAIKIGSLNYKSKHEYKQSIYVQNEENTYCLYYENKVEDKTNRAFRIIGLFELSQLNLKNENDIKLENYYNKIINGKGKNAAELPLVQILKVGTKCIFYNESIEELKELDNPDLLKRLFRVYKFNEMGTPNLFLQNHLEARKNELLDDGETFFEPNKKHYRLKIKADKFTCAIEGKHFEIKLDGEIKWLC

SEQ ID NO: 8640 - protein, 1407 aa, synthetic construct
  REGION 1..1407: note = Synthetic
MEKILGIDLGTNSIGWAIREVNPDINNQIIDKGVLTFDKGVAEDKSGEHPMVQKRTEARGKRRNYQAEKYRKWALLECLINEGMCPLTIDELNEWRHYTKGVGRKYPQIEKFIQWLRFDFDGDGKPDFERLGFSKHESYYLFRTLIVDENKTDIFKKEPQIIGRVLYQLVQRRGYNDGDSLDETEREELSKTIMKGGGDSGAVGANEIQPYILKHKTLGAALYNIQKEQGVRIRKRYNLRSQFKKEIEEICRIQGLDHLLKTLCSAIIWQRPLRSQKGLVGVCTFEKNKRRCPISNPLYEEYRTWVFINNLKIKPIVFDEHKTEEQKTKELRAVLNDVVYPQFYKVSPDFKLTSIAKELKKVGYEITAKFPSDTKVISVSFLNKMKDIFDDTWAEKIGWKDLLNGKEKAVEFSIEDLWHLHFVKATNKKTGEEPFDFLKRYAVNNLKVEEKKAETFAKIRLQQGYATLSMNAIKKILPYLQKGILYSEAVYLANLPKVLGNKKLNEGDVENFSQLIKDVIKKERQEQRQTGIFNSLVTQYFEDRQNFDANKTQLIEKQLIESYGQITWDRFSAETQSNIENEIVYAINTFLNEPKQKPENHFKKVGRLHDKIFNALLDDYGIAPENIKHLWHPSEQETYDKVHYYQEINDGNKTHFIKETEVDKFLKENPNARKGGFYGELLGSPEPISKGFKNPMALKTLHKMKRLINYLIEVDKIDKDTRVVIEIARELNDANKRKEIERLQREREKENDNYKKRIDEINTECKTNFDREDKNLINKIRLWEEQNRICLYTGNTIGLCDILNGAKYDFEHSIPASMSFDNELKNLTIADKTYNQRIKGKRLPSECPNYEDSAIIDGVEYPAIISTMQTVFGKMTEVEKKVKGKTITIRSFEKIEKLEADYAEWKSKTSDDKQIKDNIIIRRHVIKMELDYWRYKLQTFTTTEYKAGWRNSQLRDTQTITKYALPFLKTIFNKVEVQKGNITADFRKIYKIQPRLEKKERTKHSHHAIDAAVLTLIPPASIRDKILLRYNEANEKQQGYHEKPRQWDGFHHQHIIGIEDDVLINYLADHRTLTPTYKNVRKRGEIQYVREKIQDGKWKYKLNEEGNKIPLVAKGDSIRGQLHKQSVFGAIKNKGELNLVERYPIASFSSINDCKHIVDDGIREIVRNELQRRIDEDGMSFEKAKLQPIPFPNGKAVIKKVRCKVAAGRGYLTPEKALEISKHNFINKKHDYKQYAYAQNEENTLCLYYEGLIDNKIQRAFRIVGLFELSKLTLGNFNEIKKEPYYSCLEIGKGKNKQTLYLNHILNVGTKVIFYKEHLEELKEINSNNEILKRVFRIYKFNEMGTPNLFLQNHIESRPNELLDDGDTIFEAIKYQYRLKIKADKFNCAIEDKHFEIKPDGAIKWLF

SEQ ID NO: 8641 - protein, 1383 aa, synthetic construct
  REGION 1..1383: note = Synthetic
MEKILGLDLGTNSIGWALRDTSVNDNQIIDKGVLTFDKGVGEVKGIEIPLVKARTEARGKRRNYQAEKYRKWELLDFLIKKKMCPLSNEELNEWKHYKKGVGRKYPQSEKFIQWLRFDFDGDDKPDFGLFGFDKHESYYVFRMLVVCDDEQNKKIFQSNPHILGRVLYQLVQRRGYRGRDDEEEEAKTILKGSSKNGTAGVEAIIPYIEQYKTLGAALYYLQKEKNERIRKRYNLRTDYEQELKEICRVQNLDEETYKRLSKAIIWQRPLRSQKGLVGICTFEKNKARCPVSHPLYEEFRTWVFINNLKIKLPENINKATYLMQNIYPLFYNASRDFKLSSVFKRLKKDNGEITAKYTPDTKAISCSLLNNFYSLLGADWKEKYGWKETFQNQLKNCDYSIEDIWHVLFSFDSKEKLKEFATNKIGLNDEKAEKFSKINLQQGYTTLSLSAIKKILPYLYHGFIYSEAIYLANLHKVFGEKEITPENAKNYSIEIENVIKKHNHEKLLVNVVNGLISDHLNLGEFRFGMDKNYQLDDDDKNDINAKLLDVFGKDTWDQKLTNEKRENAYQYVQVNYLSFLKKPITAKKEDLFIKSGRLHDMIFQHLQDTYQVPDENKKYLWHPSEQETYPNPKEKNGIKVLGEPRPISNGFKNPMALRTLHELKKLMNYLLQTQKIDEDTRIVIEIARELNDANMRKAIEKYQRDREKENDDYKKKIKEIVDEFKLNININDKEIVDKYRLWTEQKQICLYTGKIINCKELFDGSKYNYEHTIPASISFDNELKNLTIADINYNINIKGKKIPFDCPNYDKDILGYTAIKPRLIFMDDKINDLGKSLKEWINKTKFASTKEIKDACIQRRHLIYFELDYWRKKYATFTDKEYKAGWRNSQLRDTQIVTKYALPYLKTIFKRTEVQKGTVTAAFREIYKIQPRLEKKERIWHSHHAIDAAVLTLIPPAAIRDKILFRYNEEKDNNPNNTYHETPRHWATFETHHILSITDDVLNNFQAQNRTLKDTFKNVRKRGKQQFVKYKDENDKWHYKLDEQGKEIPLIAKGDTIRGQLHKESFFGAVKLPEVREKDGKFIPKTDGKGNFVFQINEKRKDNIFIVKREEDLSSFTKFEDFDIIIDPNLSNYFRTEIGNRLKEGKTFAEAMSEPIWAFGKSKDKNGNSIKPIRHVRCRVKGGGGGYVNNPAVIKPINSYLSKQEYKRNIYALNGETAVCGFYQSLVNNELVREIEPYSILNIAKLKDGNDLESIVSPHYEKLIKKEKHLIPLYATLKVNQKVLFYEEDVQELKTLDNKELSKRLYFIVKFEDGRISLKHHLNSMSEEDLKKEMKRLNLGDVGASSFNFSFPIPKLRLSKANFNFAIEGKHFQIKPDGEIKWK

SEQ ID NO: 8642 - protein, 1423 aa, synthetic construct
  REGION 1..1423: note = Synthetic
MEKILGLDLGTNSIGWAIRDTSVNGNQIVDKGVLTFEKGVAMNKDSEEPKVKKRTESRSKRRNYQAEKYRKWALLKCLIRNNMCPLTEDELRIWSIGEWQTVDGKKKNIGRKYPQSERFIQWLRFDFDGDGKPDFERFGYSKHENCYLFRMLAVSEQPEHLRLFKENPHLLGRVFYQMVQRRGFKGRDEEEAETMLKGSEKAGTAGRDAISDMIARYKTLGAALYHINKQGERIRKRYNLRADFEAELKEICRVHDIDSTFQHQLQKAIIWQRPLRSQKGQVGICTFERNKPRCPVSHPLYEEFRTWVFINNLKIEIPGMDRKDKLEYIHSKIYPLFSRKAEDFKLSEIAKELEKVGGKITGNFKYGEKDANGKPKKDAPDTKVLTNKLMYRFNELLGRDWKEKYNWKEVLTNSEKSVPYSYEDIWHVLFTFDSTDKLGEFARIKLGLSDDASVKFSKISLQSGYATLSLSAIKKILPYLQRGFLYSDAIYLANLPRLFGTKSLAPELVDHVAETFLNIKANHFNNRIVLGAVNGLIASHVNSDVRYAIEDNRPLDESEKKEVQEALQDSFPSSIWNELSGDQKEALIFKAENLFWEFLKKPIRSTKDVLFYRIPRLHDEVFEWLRDTYHIPEENKKYLWHPSEQESYPNAKEYRKYALNGKYVYVEVANCGSFERKYPEAHWEGVVIRRLGDPQPVSRGFKNPMALKTLHKLKFLVNYLLEAGKIDEDTRVVIEIARELNDANRRKAIEIWQRIREKENEEFAKAIIGTAKPKYPNLDENDPSVINKFRLWFDQIENGQEILKQVKALKDDVDKLRLWGEQKGQCLYTGRMISITDLFDGNKFDFEHTIPASISYDNELKNLTIADVTYNRQIKKNKLPTQCPNYEKEAAGYPPITSHLRWMHEKVRHLEKQYLEYRNKTSDKKEVRDQIVQRRHLIKFELDYWRYKYESFTCTEYKSSWRNSQLRDTQVITKYALPYLKTIFKRTEVQKGEVTAIFREIYQIAPRLEKKDRAKHSHHAKDAAVLTLIPPSAIRDQILLRYNLEKDKNIHSTYHEPPIGWKDYSPSYIHVIDEDVLVNNLTENRTLTQSKKYVRTRGKIQYVKFQDNAGKWQYKVDQDGNRIPLVAQGDTIRGQLHIESTYGKIEKDGKFIMVKRNAISEFKSLKDCSSIVDEKVRQVVENALTERINNGLTFEQAKMQPIPFPSKKAVIKKVRCKVAAGRGYLSAERAISLKKHTFLSKQEHKQFIYTQNSDNVLCLYYEGLVKGRVERAFRILGIFDLASLDLNSKHDLLKEPYFQTVEVGRGANKALLQFCWILEKGTKCIFYKEHITELKDLSPKECLKRVYRIYKFNEIGSGNSSTKYLYLQNHIEARRDDELGEGDVSFDPEKYQARLTVNAAQFTAAIEGKHFKVLPDGKIEWLF

SEQ ID NO: 8643 - protein, 1143 aa, synthetic construct
  REGION 1..1143: note = Synthetic
MSKKILAVDLGITSFGFSVLKEVEENSYINIDNSVIMRDAPYDKDGKSKQTSRREQASQRSLGEKRRQRIKEVAKTFNSFGVLSYDECMQVQKNNTITDKWKLRAEDALYRILSPQELFAIMAHMAKHRGYKSIATEDLLYELELELGLVEEQTEEEDSKTDEKRQVYAALGRLKRLKETYKVDTIAQVIHKAIQEGKFRSYRNHDDYEKMVRREDIEYEIETIIKKQCELGAFAFDGERCLQFIEVLHEAITDQIMPENDESLFGQCSYYANEKAAPRYSYLYDIYRLYKTLADLKIDYYDLTQEDRDKIVDFVIQKIAKGKNLKQVYYKDIRKILGLSNEQKLYGKDDQVVIKGKSSQRTLIKFFFLNEIGKFPTLMQKILSHTEALNIFAQLAEVVRFHKTPKLALAALHELLEPYGIEVEATELLALIKSKSAGTLSISHRFILDALPYFNEGKDESFVKEILGISPSEDYNTYPKSLKYLHLGKDNLFEKTQNAINNHAVKSLASWALQNIADLSWRYGSFDEIIIESARDVLPQVIKDAIEKSMKERGKEIDKIIESYKKEFPSMDRKMARKIKLLESQKFIDIYSGEVINISDLFNGRADIEHVVPRSLGGLSTDYNLIIANSDTNMQKSNRLPMDWLSGDIEYVKRVEMLFNGHKINWKKRKNLLATSLDEIYVEVQDTKALRATSYLESLVSEVLKMYYPFPNKEHRKNGVAVRNVPGKTTSKTRSWLGIKSKSRDTNFHHAEDALILATLNRGWQNRLHRMLKENYGKSEEELQLLWQKYTPHIEGVAIAGYIKEAYERFMSKGEESLWYRDMFGSIRSVSYWVSKKPLSASSHKDTVYSSRHRNPNNPDKVVPTVRKSILGAFNGLDILKNRHKWNKEEFLKVYDKEIRQKLWLYRLDNTNDPVYRAIEERANTIGNLIEIYIYKDPQHDKAVDEVYQEVIRSLLQKPITAAGKPVYKTVFVDDTFLPIEIERGESNKVLVRTDDNFLAVMFEKGEKEKLNISKVDVNSLHRLKKENAMIVYLNEVIYLFNKKKIIHYGALRSFKILSSGARYISLFNPRFPANPSSQPKKFTDGKSIKSISIGSTTGVIKVHLDLNGKMKSYQKFGFIPKELEAQFLKESGYGIVEDDTNH

SEQ ID NO: 8644 - protein, 1132 aa, synthetic construct
  REGION 1..1132: note = Synthetic
VKKILGVDLGITSFGYAILQETGKDLYRCLDNSVVMRNNPYDEKSGESSQSIRSTQKSMRRLIEKRKKRIRCVAQTMERYGILDYSETMKINDPKNNPIKNRWQLRAVDAWKRPLSPQELFAIFAHMAKHRGYKSIATEDLIYELELELGLNDPEKESEKKADERRQVYNALRHLEELRKKYGGETIAQTIHRAVEAGDLRSYRNHDDYEKMIRREDIEEEIEKVLLRQAELGALGLPEEQVSELIDELKACITDQEMPTIDESLFGKCTFYKDELAAPAYSYLYDLYRLYKKLADLNIDGYEVTQEDREKVIEWVEKKIAQGKNLKKITHKDLRKILGLAPEQKIFGVEDERIVKGKKEPRTFVPFFFLADIAKFKELFASIQKHPDALQIFRELAEILQRSKTPQEALDRLRALMAGKGIDTDDRELLELFKNKRSGTRELSHRYILEALPLFLEGYDEKEVQRILGFDDREDYSRYPKSLRHLHLREGNLFEKEENPINNHAVKSLASWALGLIADLSWRYGPFDEIILETTRDALPEKIRKEIDKAMREREKALDKIIGKYKKEFPSIDKRLARKIQLWERQKGLDLYSGKVINLSQLLDGSADIEHIVPQSLGGLSTDYNTIVTLKSVNAAKGNRLPGDWLAGNPDYRERIGMLSEKGLIDWKKRKNLLAQSLDEIYTENTHSKGIRATSYLEALVAQVLKRYYPFPDPELRKNGIGVRMIPGKVTSKTRSLLGIKSKSRETNFHHAEDALILSTLTRGWQNRLHRMLRDNYGKSEAELKELWKKYMPHIEGLTLADYIDEAFRRFMSKGEESLFYRDMFDTIRSISYWVDKKPLSASSHKETVYSSRHEVPTLRKNILEAFDSLNVIKDRHKLTTEEFMKRYDKEIRQKLWLHRIGNTNDESYRAVEERATQIAQILTRYQLMDAQNDKEIDEKFQQALKELITSPIEVTGKLLRKMRFVYDKLNAMQIDRGLVETDKNMLGIHISKGPNEKLIFRRMDVNNAHELQKERSGILCYLNEMLFIFNKKGLIHYGCLRSYLEKGQGSKYIALFNPRFPANPKAQPSKFTSDSKIKQVGIGSATGIIKAHLDLDGHVRSYEVFGTLPEGSIEWFKEESGYGRVEDDPHH

SEQ ID NO: 8645 - protein, 1129 aa, synthetic construct
  REGION 1..1129: note = Synthetic
MGRKIFALDLGITSLGYSILEEVEQNSYHCIDNSVILRDSPFDDKGNSKQMIRRAHVGARNLNKKRKYRIIKVAKTLENFGVLDFGEAMKVQKENRIINKWKLRAEDAFSRPLSHEELFALFSHMAKHRGYKSIATKDLIYELEAELDLTGEQSSSANLDDESRKIYGALNKLEKLKKRYPSETIAQVIHRAVQSGELHSYRNHDDYEKMIRREDIEREIESVVLHQYKLGAIDIPEEKISELIGELNSCITKQEMPTIDESLFGKCTFYKDETAAPRYSYLYDLYRLYKKLADLRIDDYEVTRNDRERIIEWVEEKISSGKSIKKITYRDLRKILGLSPEQKIFGQDDEQIIKGKKEPRTFLPFFFLADIKKFKDLFSSIQRHPDSRQIFRRIADILQRSKTPREALDRLRILMADEGIEAPDRELLELFKNKKAGTQELSHRFICEALPLFLEGYDEKEIQKLLGFTDTEDYSRYPKSLRHLHLGEGNLFEKEEGVINNHAVKSLASWALGITADLSWRYGPFDEIILETTRDALPEKIRKQIEKAMGEREKILEKIIEKYKKEFPFIDKRLARKIRLWEHQKGLDLYSGDMINLTQLLDGSADIEHIVPKSLGGLSADYNTVVALKNTNAAKGNRLPGDWLAGNSDYRKRVEMLFEKGLIDWKKCKNLLAVSLDEIYTENIHSKGIRATSYLEALVARLLKRYYPFPDPELRKNGSGVRMIPGKVTSKTRSLLGIKSKSRETSFHHAEDALILSTLTRGWQNRLHRMLRENYGKSEAELKEIWKKYTPHIDGLTLADYIDEAFNRFMSKGEDSLFYRDMFGGIRSVSYWVNKKPLSASSHKESVYSSRHDVPTLRKNILKAFDELNVQKNRHKLTAEEFMKLYDKKIRQKLWLHHIGNTNDESYRAVESRAARIAQTLTRYQLMDAKGDKEIDEEFKQTLKELVESPIEVNGKQLRKMRFYTNERVFQINRGAVVSDKNMIGVQITKGRKKKIIIRRMDVNNAIELQKEKSSMLCYLNETLFIFNKSGLVHYGCLRSYLENKQGAKLIALFNPRFPANPKAQPLKFSDNNQIKQVSIGSATGVIKAHLDLDGRVKSFEVFGMLPEGAVGWFKKESGYGSLEDDPHH

SEQ ID NO: 8646 - protein, 1142 aa, synthetic construct
  REGION 1..1142: note = Synthetic
MKRILAVDLGISSFGYAILEESGANHYRCIDNSVVMRDTPYDNDGNSKQSLRRSHSSMRSLNEKRKRRVRELARIFDSYGLLSYEECRRVRRENKIIDKWKLRAEDALSRPLSMEELYAILVHMAKHRGYKSIATDDLLYELELELGLTQEEPETLKDDEKRKVYTALKRLERLKERYEGETIAQIIHKAVLEGELRSYRNHDDYEKMIRREDIKEEIETIVKKQCEFGALPLDSGRCMEFIEALHATITSQTMPENDPELIGKCSYYPQEKAAPRYSYLYDIYRLYKTLADLNISNYEITAQDREKIIEFVTQKASKGKNIGQLLYKDIRKLLGLGDGQKIYGKDDRLKIGGKSVERTLVKFFFLKNISKFPSLMRKIISHTESLDIFGEIAETIRAHKTPRPAMDALKDILKRYEIEYDDMELIELIKGKSAGTLHISHRFIKDALPHFAEGKNEKEIKEILGVHICENYGDFPKSLKYLHLGKDNKFESENSQIPINNHAVKSLASWSLRLIADLSWRYGVFDEIIIESARDVLPKSIQDAIDKSMKKREKELDAIIGKYKNEFQSIDRKMARKIKLLESQNFMDLYSGGTIAISDLLEGRADIEHIVPRSLGGLSADYNLVIAHKDSNMQKSNRLPMDWLGGDKQYLNRVEMLFAEHKIDWKKRKNLLATSLDEIYSEVAHSKTLRATSYLESLVSEIIKMYYPFADEKSRIDGKAVRNVPGKTTSKTRSWLGIKSKSRKSNFHHAEDAMILATISRGWQQRLHTMLKENYGKSEDELKDIWKKFTPHIEGISLAEYIDEAYERFMSKGLESIWYRDMFGGIRSVSFRIDKKPLSGASHKETIYSSRHRDPENPDKILPTVRKSILDAFGALNILNNRHKWDREKFIKKYDKEIRQKLWLYRMGNLNDPVFRAIEKRAGEIGDLMESYIYKEPSHDKEIDERYQEELRELLQKPIVASGKAVYKVPFVDDSFSHIEINRGRGNRVIVRTDKNFLAVMFERGKKDRLEISKIDLNSMHRLRHSDAMIVYLNEIIYLFNKKKIMHYGALRSFSIDKQGGKYIKLFNPRFPGSPKSQPGFFSTGSSIKAVSIGSATGVIKVHLDLDGRVKGYEKYGSIPKELERDFLEESGYGVMEDNTHH

SEQ ID NO: 8647 - protein, 1127 aa, synthetic construct
  REGION 1..1127: note = Synthetic
MESKKILSLDLGITSLGYAVLEEIEQNSYKCLDNSVIMRDSPYDNSGDSKQSLRSKQASLRKLISKRKRRIKNLAKLFEKYKLFSYKDAIKLQKENKYKNKWILRAVDALQRELSIEEIFSIMAHMAKHRGYKSISLEDLLYELKIELGLIDSHKENNINDDEKRKVYAALNQLEQLKVLYPSETISQTIHRAVKDGKLRSYRNHGDYEKMIRREDIEDEIETIINKQYRLGAIKLNGDEIVEFIEELKEIITDQIMPQNDMNLVGRCTFFKDEYAAPKFSFLYDLYRLYKTLADLRIRNYEITDKDRYKIVETIFEKLKNGKNVKDITYKEVRKILSLSEDQKIYDRDDTYIVNKKREQRRLVKFFFISEVSKYPNIIKSIILNSNSIEIFAKIAEIIREHKTPKPAIKEIKTLLTDEGISIEDSEILSLVETKKSGTLSISHKFIIDALPLFKDGKNEKEIQEILGVTTTEDYSTFPKSLKYLHLGRGNLFENGNFGKAPINNHAVKSLASWSLKRVAELSWRYGPFDEIVIESARDILPEKKRKEIERGMHAKEKEIDKIIKEYKNEFPTIDRKMARKLNLLKSQKFLDIYTGRTINISDLFNGNADIEHIVPRSLGGLSTEYNLVISYKDSNMKKGNRLPMDWLGEDIDYINRVEMLRSEYLINTRKYKNLLAKNLDEVIVEVKDSKSMRATSYIEALVSEVLKMFYPFLNPVHRKYGNAVRNIPGRTTSKARNLLGIKSKSRDTNFHHSEDAMILAAISRGWQNRLHRLLRENYGKSEDELKKIWQNHTPHIEGMAIDEYIKEAFERFMSRGEDSLWYQDMFGGIRSISYWVNKKPILASSHKDTIYSPKHKVPTLRKDINNEFSNLDIIKDRHSINRDKFMKKYEEKIRSKLWYNHIVNYNDPVMRAIDKKANDIASIFDDPYYLNSKKDKEIDEKFKEKLSETINSPIMVDGKRVRSVRFVYSKLNAIKITRGVVESDKNMMGIYVEKGNKKLQLHRIDVNNFHNFKEKKDGMMIYLNDMVIFFNKKGIIHYGALRSYVDSIKKVALFNPRYPSSPKLQPKQFSTGTQIKQVGIGSTTGLIKIVLDLSGTIKSYEKFGTIPKESEDKFLKESGYGILEDD

SEQ ID NO: 8648 - protein, 1114 aa, synthetic construct
  REGION 1..1114: note = Synthetic
LASYSTKKNGAIIRAAEQENSFTFEVPYERAVFKFEPLILSLIPFKINDNNLKMSTTNLSNFNLSFDIGYSSIGWSISSKPANAVFPNWLGAGVVVFDDDSCMAKSRAEFRRMRRNIASKRNRIKRMREVLSGLGVMGKDELDNAKTEHPWFLAAETLASGKILSWSELWSVLRYYAHNRGYDGNSMWAKFGDDSGGDSEREANAEKLMADLGTSTQAETICAYLGVDAKSPKPLRFKKYFKGQNLAFPREIVFKEVERIIDAHIGILPKCDENFKKLMIGNWREVPSNIKLPGRFTSDRGLLFGQYMPRFSNRIITKCPLSGEKTPNCHSREFLDFRWKSLLANMAFPDGTDLMETRRKIDDFMLLYGALSKNALKKILKEVIGELPSNYNGMFLASEMEKALEVDPVRALILRTVYPNISFSLPNAELVEKLWKLIPKFVFTRMFRLKEYSFADICALLSPEKSAELAEFVRVIFDSSPASKKSPKPDFETAFNFKMRVQKISGRSPYSRQLMKSASEEIMRGVDPRSEGGSLYPRSESTKKEVLSNIDTWTNNHLVRHRLKIFKRLYMDIVREYCGADKSLVKSVAIEVVKDITAFSGLDSKKKAAKLNDLVAHHKSVSAYLKKEYPELSPNGSILRKARIADDLGWVCPYTGCHFSPRQLFESGNMEREHIIPRSLRPSDSLESLVITWKEVNDMKGQRTAYEFIKECQGMKVPGRQNLSIVTPERFEAFVRRLKKPMHPAGKADIERIKIRNKLLLTEHYKKREGGFLPSDLTQTSHLNKLAFKVVKSLYADAEKAPELIHVPGIVTSVVRKNWDLLPCMGDACPEIYETLENGDKVLRLKDEIRSITHLHHAVDAVAMGLAASVFPRTRNFYEAVSKRRLNQADRQELLKTGLVLFSGDKWKLVELEKSYLKEISGRISENRVVKFLPRKMSGMDVEQTLWGVVKENENGTVTIRQYGAGKGESRRSIKKAYEPKLKLLGYESKNTAKSKLARNKAVIIIKGNFGVALANPPQIIPHHNVWQRLSELAEKNGGRFPKILRRNQIIEIPSGRYKGIWRITSIKNNSNYIGVDMIHPIYVRIKEKSKINVNLNTIIKDGMKIIDTRLIGA

SEQ ID NO: 8649 - protein, 1108 aa, synthetic construct
  REGION 1..1108: note = Synthetic
MSRSDFCLFKLSFDIGYSSIGWSVFKIAHGDAFPILCGCGSLVFDDDCCMAKSRAAFRRARKNIASRRNRIKRMRKVLLSMGVMGPEELDNAKTDYPWLLASRVLSCGNKLSWGELWSVLRYYAHNRGYDGNSAWAKFDGDDGDSEKEANAIKLMQELGTRSQAETVCAYLGVDPSSSAKPALRKYFKGQNVAFPRQIVISEVGRIIDAHIGHLPGCDENFKKLIMGNWREVPSPIEMPGRFTSDRGLLFGQYVPRFNNRIIPKCPIEGRNVPSCHSREFLNFRWKSLLSNMSFSEGIDIAAARKNIDSAMRLYGSFKKTTLKTIFKSLLGELPLNYESMFLSEEMDKALLLDPVRALILKTIYPNISHSLPSAELVQNLWDLIPKFIFTQMFRLKEYSLEDIYGLLEDKKRARFRSLLLEIFDSSPNSKKTPRGDFENVFKLKMRINKISGRAPYSRIAMKKACAEIMEGRDPRANGGALYRNAENARSELLSNIDTWSNNHLVRHRLKMFKRLYVEIVNRYCGGDLSAVKSVAVEVVKDMGEFSGLDPKERAAKLNDLVCHHKSVSEYLEETYPELKISGSIIRKARIADDLGWVCPYTGRHFSPRELFESGNMELDHIIPYSLRPSNSLESLVATWKAVNEMKGQRCAAEFIKECQGMEVPGMPNVSIVTPERFEKFVSGLKKPQHNARYPDLKRIKKRNKLLLTLKYNKREGEFLPADLTQTSHLNKLAFKVVDSLYVDSEEKPELVHLPGSVTSVLRTNWDLSACMAKACPEIIVTVKSADSASGERGMGGDGLPQGLNGSVTDTAACCGGEADAPQSGGSSGGEKKVLLMKGKIRSITHLHHAVDAVAIGLAAAVFPHTNRFYELVSKRNLNRSEREELYRTGLFVFSERNWRLKELPAKLINEISDRIAEGRVVKYLPRKMSGMDVEQTLWGVVKEDVGGLVTIRQYHSKANSAKRRERKIEIEKKIKLLGYEPENVAESKLARNKAVIIIKGNFGVALTTPPKIIPRHKVWQRLGKLAAENGGKFPIVLRKNQIIDVACGRYAGRWRITSIKNNAGYIGIDMIPPIYASGAKNRLKVNVNLNTLVRDGMSIKSGCLTGAC

SEQ ID NO: 8650 - protein, 1044 aa, synthetic construct
  REGION 1..1044: note = Synthetic
MNTFKHVQPFVLGLDIGVASIGWTLIGLDDSGNPVRLLRTGAHTFDPSVEGDIESGRDEARGAARRMARMPRRMFERRQRRRKKLLRLLQRSALLPPGKIGSPQEIHEYLLALDTQLRNRFNPKNERVTSHVLPYRLRAAALDGKLDPYELGRAIYHLAQRRGFLSNRKSLKKDEDEGVVQQGITELQAEMNTTGARTLGEYFASLDPELERIRRRWTARSMYVDEFNQIWTAQGTHHPEILTDALRKQVYRAIFFQRPLKSARHLIGRCELVPNARRAALADRLVQRFRMLQKVNDLEIIPHDAPKRRLTDVERAKLLDALNKNGDLTFSRIKSKAVLELPKATTFNFEQRDEEKKLPGHRTDEKMRAVFGDRWDAMEDEERDAVVLEVLSFQNPDALARRAVKAWGLDEKAARLLADTRLEQGYASHSRSALKKLVAKMENGTPYATARRELFPESFKAVEPTDRLPPVYKAMGAIRNPAVERALTELRKLVNEIIRVHGKPECIRIELARDLKRARKERERKSREIAEQTKLRDQAKAKILRDMNIAEPRRSDVEKVLLAEECGWQCPYTGRQISMRALFGEHPQFDIEHIIPFSRSLDNSFLNKTLCHHQENRDHKRNRTPFEAYGRDEKRYDEILARVRRFQGKAADAKLRRFEMQEIPDDFVNRQLNDTRYASRLAGDYLAVLYGGRSDASGTLRIQISTGGITAHLRNEWLLNSILGQGEKNREDHRHHAVDALAVALASPGLVARLQRAAERASDEGRRLFARVPEPWPGFLEQAREKIMAINVSRRQAKKLAGDLHEDTNYSKEYTWTDENGKTKPIRHVKKRIDAMNESQVDDIVDPVVREKVRVWVKAQEGKSKKEIGPPPTIKTRDGREIPIKSVRIRKVIGAVAVGKGPRTRYVKPGANHHSVIVAVLDKDGNEIAWEDYPVTRLEVHQRKAEGRPIIQKDWDPGKVFKFTLTANDFLLLKQRDGEDLLCRLLSLSEGAYEGRVHYDARMASEARKKGSDARIRLTADSMRQRHARKVRVTYLGEIVPAND

SEQ ID NO: 8651 - protein, 1063 aa, synthetic construct
  REGION 1..1063: note = Synthetic
MKSLADRKPYSLGLDVGVASIGWAVIEEPEPNRPAALIRSGVHAFDEGVEGDIESGRDEARGAARRQARLPRRMFWRRQRRKYKLLRILQRARLLPDGVIGQPQAMHDYLLKLDADLRRAHLASGDRIAAHLLPYKLRARALDQALTPTELGRAFYHLAQRRGFLSNRKSMKKDEDEGVVKQGILELAAKIQAAGARTLGEYFAGLDPEAERIRKRWTARQMYIDEFNAIWQAQAPHHPSILTEAFRSELYRAIFFQRPLKSASHLIGRCELVPNARRAAVADRLFQKFRILQNVNNLEVLPSDGPARPLSAEERAKVISALTSEGDMTFARLRGKQMLKLPKGTELKVWGQDEEKKLPGHRTDEKLREVFGERWDSMSDDIRDAIVIEILSFEKPQALERRAIKAWNLDPAKAKELSELRLEQGYAAHSRKALRMLIDGDKERGIPGMQDGTRYGTARRELFPESFKSSEPVDRLPPLKKAMGEVRNPAVERTLTELRKLVNEIVRVYGKPQTIRIELARELKRARKERERLSKENAAREKLRAKARARILAEAGVQEPRRSDIEKALLWEECEGQCPYTGQSIPFASLFGPSPQFDVEHILPFSRSLDNSFLNKTLCAVAENRDRKRNNTPFEAYSRDPKRYEEILARVRRFKGDAAEKKLTRFEMQQIPEDFVSRQLNDTRHAAVKAADYLAMLYGGRTDANGRLRVQVSAGGLTAHVRNELGLNAILDDGGQKTREDHRHHAVDAIVVAMLGPRQVQILQTAAERASAQGRRLFASVEEPWTGFLDDVRKAVDSINVSWRQDRKLAGGLHEETNYSAKEHSHADKKGQLKPHRHVRKPVDTMSESQVDDIVDPIIRERVRAWIALRDAKTDDPKPPYPVSHTHDGREIPIKTVRIRKTIGVEPVGMDQTPDGPKPGPRTRYVKPGANHHTVIVATLDKYGNETRWDDYPVTRLEAHRRHAAGRPIIRKDWGENRKVKFTLTRNEYLLVRDQEGGDRLIRCISVSEGANEFRLHTDARSATEARKPGSGARIGLSGENMRKRNARKVRVTMLGDVIPCHD

SEQ ID NO: 8652 - protein, 1041 aa, synthetic construct
  REGION 1..1041: note = Synthetic
MPEQPKMTYVLGLDLGAESLGWAILETRDGEPVRIERTGVHTFEAGVEGDIESGKDESRAKARRDARLPRRQLWRRAARRRKVLHILQRHGLLPPGEARTPEQIHDLLLKLDADLRAAYLPAGDEVAAHLLPYRLRAKALDEKLEPWALGRVFYHLAQRRGFLSNRRSPERKDEDEGKVKAAIGELAADMKARGARTLGEYLAGLDPRCQRVRRRWTARTMFLEEFDRIWAAQAPHHPCLTEELRGQLRRALFFQRPLKSQKALVGRCELIPDRRRVALALPIAQRFRLLQKVNDLKVREPEGTERFLTPQEREKLARELDDKGDLKFDKVGKCLGLPQGVTFNLQEGGEEKLPGNRTYAKLKAVLGARWGGLSAADREQIVVELLSFQKPEALARRLMKVWNLDEPSATKLAEVRLEQGYARHCRKAIARLLPLMESGVPYATARKEVFPESFAAGTPVDRLPPVTDVLKDLRNPAVCRALTELRKVVNAIVRRYGKPECIRIELANDLKRPRKQREEISKRNRGRQKDREKAAEAIRSALPGLEPRRADIEKWLLAEECNWRCPYTGRSINAAALLGSTPQFDVEHIWPMSRSLDNTFANKTLCYHEENRARKGNRTPLEAYGSDPQRWEEILQSVRRFNGPLAWEKLRRFMAREIPQDFTDRQLQDTRYACRLAADYLGRLYGGRVDAQGKMRIEVRPGGLTAHVRNELMLHAILDDGGAKTRADHRHHAVDALAVGLTSQSMVQQLQTAAGRALQAGRRLFAPVPEPWTGFLEDARRSIGQIIVSRRPDRKVAGKLHAETFYSKPIPGADGDVRHVRKELRKLTLGEIQGDRIVDPVIRRLVQERHRQLGGGKPDSVFADPASHPVLRTRDGREVPIHKVRIRSKEKPWPIASGSRLRYVVAGGGTNHHLAIVARPGRRGRGEYWEDHIVSRYTAQQRLARGEPVIQKDWGPGRRLVMVLMPNDFIVMPDDRGVQQVYRVLSISEGDTELRLHCDARRAEDLKKARERVRVSGEKLRKLGGRRVEVSLLGELIGAHD

SEQ ID NO: 8653 - protein, 1041 aa, synthetic construct
  REGION 1..1041: note = Synthetic
METPTRRPFVLGLDLGARSVGWAVVDLQEGEPTGLRAAGSRCFEAGVSGSIDEGRDEARGQQRRQARQVRRQLARRQLRRTQLLRTLVANGLLPPLEGFDSLAIHRYLAAFDQGLRSRHLSADDRVGHQVLFYRLRTRALDEVLELHDFGRVLYQFGQRRGFLSGRKRRMKEGEEEGLVRKSIAALAEEMQAAGARTLGEYLAGLDPFTQRLRARWTARSMYEQEFAALWASQARFHDALTDGLRKKLAEVFFFQRPLKSQKGRVGECDLVPGRKRAPLACREAQRFRILQAVNNLRVARPGESEVELSPDERKRLLEALTAKGDLTFARVRKVLGLPKETEINLERGGEKRLVGHRTDAKMAAAFGARWEALGEPERDRIVDEVLSMEDPEALGRKAEKVWGLDPAAAAVLRETTFEPGYAAFSRKALRQLLPAMEAGEAVETARRRLFPEAVAARPAIGSLPRVEEALPALRNPAVARALTELRKVVNAIVRKWGVPEVVRIELARDLRNSRERRYRMARENRERETSREKAREEIRRSTGIAAPSRSDIEKYLLAEECGWECPYTGRRIGMTELFGEHPAFDIEHIWPLSRSLDNSFLNKTLCFHEENRERKRNRTPMEAYGNDTARFEQILARVGQFRGSARFVKLARFAADEIPSDFTERQLQDTRYATRMAMRYLGTLYGGTVDADGRRRVQAGAGGLTAIVRNELGLNSILGDGGLKSRDDHRHHAVDALAIALLDPGLVQRLQRAAERAPSHRRRHFAPLDPPWEGFLPEVQRVVDEVVVSHRTGRKISGALHKETNYSREIRTLDENGGIRWVRRLRRPVHLLTARQVEKIADHAVREAVRRKLEEVGGKADRLEEDPPVLEQPDGRRIPIRRVRVEESVNPRRVGSEGRERHVETDANHHMAIFARLDADGAEVAWEAEVVSQLEAQRRLRSGEPVIRWETEPGRSFKFSLSPGDTIELELNGVRRLLHVRSVWMEGETGRIACVNLADARQIADLRKASSWFRPMLSGLRSGGCRKVEVSPLGEVFPAGG

SEQ ID NO: 8654 - protein, 1273 aa, synthetic construct
  REGION 1..1273: note = Synthetic
LVPPGRREQRQVRGGRILPAWPLHPRQQRPAFRAGLPGDLDIQFRAFDFDLAHDRGRVDFDGHPRPAAHHRHHAQRFHVARQHVCHHFHHGGRVPDRGQHAVFHHQLRSRPAHHQPRRTLRRLTRGAAGIVCTRSVEPRQPGWPTAVHCDMRENRHEASVPQVWRKKTPPEGSVTSGKPMRVHPGRSRGSVALRGRKSLTMGCGTSVAQIHYWPRYIKSAPLSRKKNMAAGKHAEHHSDYILGLDLGTESIGWALVGTQGGRPTGIVAIGSHTFDAGVLGDIEKSPSAARRSARQARRQIWRRQWRRNKLLRLLQRNGLLPPGDISTPEAIHQYLLEYDRHLRAKFNPEGDRVTLHVLLYRLRARALDHRLELFELGRALYHLAQRRGFLSNRKSQRSDEDEGKVAAGISDLSRRMADCQARTLGEYFSRLNPEQERVRRLWTSRQMYLDEFEGVWNEQAKHHSNVLVPELKRQVHRAIFFQRPLKSQRGLLGRCDLFPLLRRVPVADRTSQRFRLLQKVNDLLVLFPDATSRPLGEDERHTLLERLELDGDLKFSTIRGRKCLNLGAGVRFNFEQGGEKSLPGHRTDVKMRGVFGDAWDRRSEAERDAIVNEILSFERPEALKKRAMKAWGLDESSADRLATLKLESGYAAHSRKAMRILIDRMKDGKPYATARREAFPEQFTSSEPCDALPPLRRKMGDVRNPAVERSLTELRKLVNAILRRFGKPATIRVELARDLKRARKERERISKENDAQRSRREQAKAAILKKAGITDPSRPDITKWLLAEECGWQCPYTGKPIDWASLFGSNLQFDVEHILPLSRSLDDSFMNKTLCYHEENRSRKRNHTPWEAYGADETRFREILERVGRFQGRAARLKRERFEMKEIPEDFPSRKLNDTRYASRLAARYLSLLYGGRVDSAGTQRIQVSTGGLTHHLRNEWMLNGILDDGGEKTREDHRHHAVDALVIALTDPASVQQLQRAAERASAEGRRLFGRVDEPWRGFLDQARDAILRVNVSRRLTKKIAGTLHAESLYSKPRRAHGGEPAVHLRKELHKLSVDDLKQERIVDPVIRSIVRKKWQELGGGDPKKVFADPSSHPAITTRDGRRIPIHKVRIRVSVVHRPVAQGARRRLVAPAPHWNHHAVIVATLDDQGNETRWDDYPVTRLEVHERKARNIPIIQKEWEAGRRFKFSLAAGEYVMMHDQADSPQLCRLLSVSKGRYEFRVHYDARKTPEARKRGSGARIFASADRMRIRKARKVRVTYLGEIVPAND

SEQ ID NO: 8655 - protein, 1503 aa, synthetic construct
  REGION 1..1503: note = Synthetic
MKEEDMSGKPTDLLTFGFDIGIASVGWCVLGKKHIVDLGVRCFDPGEDNDGKPHNQTRRAARVARNRLHMRRWRLNQLLRLFCDVGIISRPEARLLMTPPRAKDEPEVGPWQLRAQGLERQLDPVEWARVLYHLVKHRGFEFFRRSELKSAQKQDSSKGEDTSRVESSEATLAEAAAAKEKEKLNKALEASSKLLEKYRKLKQNNHLTVGGLAIWLAQDNYAPDEPQPDEQDRIQSFRNKAGSYRHAFLRAALRHELKTLFTAQDKHQNPYTTLELPVDSEYLHQMLTCFKDGVIPVGGESRSVGRTFQEAIFDLFDMQHPPLYAEQIREMVGECELIEGQPRASKNSFSAERATWLETLNKLRIRRNGKEEDLSQLERNCLLNLPYEHSKVTLKLVRETLMAHTGFPASWQEASFNAATYRAKPASDGAWILIVPRGEVPISLVKWANSKERKEKLREAKKLLTGGFVTYKQLREKLGLQDSDSFICRIKDTSIIPRSLEARTQIRFSSDNNTILASGHSFRCITTEGKPKALPKVTWRLLASLRSHSAATMADWRTLLMPLKDMPGDWQFEHSILSEYTINPDSEERTPVPLQFEDAQAVEADQKLVELKGWHALRLALAERFPDKWEGMQTAYQKPTSDEGERAASEINDIATTLTECQTDREIEQKLSNLGYNSEEITALQTISFNKFRNLGFMALRKILPYLEEGHVYSKACELAGLKHSEKEAQRRTPELRPLETYVYPRYRHGKLTGHIEKRYKELLNPVVARSFNQARLVFNCLVAKYGSPTYVHVETARDLARSKKLRDKIDREQKSNNKRAEGIKEDLRNRLGCEPTPTQILKMRLYGEQNGQCMYSGTSLEPFIDSMLKDNSGDVEIDHIWPRSKTFDNSLDNRVLVKTGANRNKDSKIPYEFFGGTNCDKRWHEFEQRVLSCKGISAEKQRRLLAKNLEDADEFLARNLVDTRYATRLFANMLRERILFANAPSPEELEAISPNDDAKTRWNRYQRARVRTPQGRLVDFLRGKWGLAHVKDRKKSDLHHALDACIIAACTPQVIQRVNNYFAEEEAEPHRHIFRRNDDGSYTHRGTGDIVSRAEARERGLFLPAPWDDVHDGKFRRDLLSALGQVFVSRHPKRKSAGELHDANPKGIRYLPVPLVDLTKDMLTDKCLQGITGRRRRNYEILREALQLANGDAHVAFANGYEIQEVSDKPKFVRCIALPAWSLPDEYLKQRRSALAKINKEKRKEGSGKIIENTASVRKTVPLTSLKKEMLTEAKLGSAFYHRNRELLEALQNQLDKFNGEAKKAFAEPFRPPKGKSGKERPLIRSIRLPVKQDGGMLVRGGVAGLGDSIATEVYWTSASYFFRPRYQADKEAMFGLEELPTGARQLFNLRIDEPIEVVLTSGEVIPGGGFPGYFVMYEGDGRMTIRTHDRPGKGRKKTKQTGENADENDSDEQSEKAKTDTVKDSSLFRFYVKNIKELRKFKIDILGKWKEVNVGFKHGLA

SEQ ID NO: 8656 - protein, 1495 aa, synthetic construct
  REGION 1..1495: note = Synthetic
MSSKPTDPLTFGFDIGIASVGWCVLGESHIVDLGVRCFDSGEDSDGKPHNQTRREKRVARNRLHMRRWRLDQLLRLFCDVGIISRPDPRLLMSPPQIRGEPDTSSPWQLRAQGLKEKLEPIEWARVLYYFVKHRSFEFFRKSEINSTTDKDVEADKAGATDETQGAQGEAATEKDKKKLKAALSGTTTLLEKYRKRTQNPNLTVGALAVWLSKDKYEADAPQPDEEDRKSFRESLRNKGGNYRHSFFRAALRQELQELFAAQAEYGNPCTILDLPADSEYLRYMLDNTKLTPERNIPVGGESRPVGRTFQQAVFDLFDLQHPPLYGDQIREMVGECELIEGEPRAPKNAFSSERATWLEKLNHLRVRRNGKEEPLSQDERKVLVNLPYEHTKVTLKLVRETLMANAGFSASWREASFNVASYQAKPANDGAWILIVQHGEEPVSLAKWADTEKRKKNLKEAKKQLTGGSMTFAVLREQLELADSDRFIYRIKETSIVPREQEPQARIPFSQQGDGILASGQSYRYIQSDGKPKALSKAAWKAVATLSHSTATLADWRTLIAKFKDMEGAWQFEHSATKEDAVEASAESQTLVPLQFEDAQAVEADHKLVELKGWHAMRLALAEKFPDRWASLQVAYKKPINPEGLSAAKHIDDIATILTVSQTDHEVEEKLSALNYVKAEIEALQTIGFSKFRNLSFCALRKILPYLEDRHVYSEACKLAGLSHSEKNHQRDRYLPPLETFVYQRYRHGKLTGHVEKRYKELRNPVVARSFNQARLVFNALVAKHGSPAYVHVETARDLARSKKLRDEIKRQQETNGKRIESIRNDLKNRLGCEPTPTQILKMRFYGEQKGQCLYTGKSLEPFIDSMLTEDSKDVEIDHIWPRSKTFDNSLDNRVLVIAGANQNKRNQIPYEFFINGPGGEQGWREYEKRVLDCKGISAEKQRRLLSKTLEDADEFRARNLVDTRYATRMFANMLRERILFAGSVTPEELETISPDDDGKTRWNRYQRVRVRTPQGRLVDFLRGKWGLARLKDREKSDLHHALDACIIAACSPAVIQRVNNYFAEEEKEPGRHSFKRNSDGTYTHRTTKKTFSEEEARAQGLYLPAPWDRFHRDVRNALGKVFISRRPKRKSAGEVHDANPKGIRYLPVPLVELTEEMLTDECLREVAGRRRENYEALRMALQATNGDAQMAFADGYEIQGKHGKLKRIYGIAMPLWSLPDDYLKQQNKALTKENARRRKEEDAKPLSENLSKTARKTVPLTSLTQKMLTEAELGSTFYHRNRELIEALKAQLGDKKAKVAFAQPFQPLPGKKGKKRPVIRSIRLPDSHGSGILVRGGIAGMGDSICTEVYWTGSSYFFRPRYQADKEATFGVEDSPKGASHLFNLRIDEPIEVVLEDGEIIPDNNLPGYFVGYEGDGRITIRTHDRPGKGRRKKEKAPDESESEEIADKPDKEDTKDNSLWRFSVSGIKQLRKFRVNALGNRKEIHAHLKHGLA

SEQ ID NO: 8657 - protein, 1487 aa, synthetic construct
  REGION 1..1487: note = Synthetic
MKSNLSPKNPLTFGFDIGIASVGWCVLGEDHIIDLGVRYFDPGEDNDGKPHNQTRRSKRVARNRLHMRRWRLNQLLRLFCDVGIISRPEPQLLISPPRGKGKPDTSSPWQLRDQGLKRLLEPIEWAHVLYYMVKHRGFEFFRKSEINSPADKDAEADKTEEISETQDAQSEVTTEKDKKKLKAALSDTTTLLEKYRKRTQNPNLTVGALAAWLSKDRYEASEPQPDEDDCKLFRESLRNKGGSYRHSFFRAVLRQELQELFATQTNHGNPYTTLELPADGEYLQRMLGQGNTKLTPEKTIPVGGKSRLVGQTFQQAVFDLFDLQHPPLYGDQIHEMIGECELIEGQPRAPKNAFSSERATWLEKLNQLRIRRNGSEELSPKERECLINLPYEHTKVTLKLVRETLMANTDFPASWQEANFNVARYQAKPANDGAWILIVPRGEEPISLVKWADTEKRKKNLKEVKKQLTGGSMTFTALREQLELDDSDRFVYRIKETRIVSREHEQERIPFSSQGEGILAKGQSYRYICSDGKPKVFSKAAWKAVTTLRTRSTATLADWRTLIASFKGMEGAWQFEHSETKEEAIEVSDELRTVPLQFEDAQAVETDHKLVELKGWHAMRLALAEKFPDRWASLQVAYKEPASTQGLRTAKDIDEIATILTLSQTDHEIEDKLRTLAYSETEIEALQTISFSKFRNIGFEALHKILPHLEEGHIYSKGCSLANLSHSEKNYQRSRYLPPLETFIYQRYRHGKLSGHIEKRYKELLSPVVARSFNQARLVFNSLVAKYGSSTYVHIETARDLARSKKLRDEIRRQQETNGKRLEIIRNDLRNRLGREPNSTQVLKMRLYLEQKGQCLYTGKSLEPLIDSMLNENTNDVEIDHIWPRSKTFDNSLDNRVLVIAGANQDKRNLIPYEFFNGAGGDPRWREFEKRVLDCKGINAEKQRRLLSKTLEDADEFLARNLVDTRYATRMFANMLREGVLFAGGATPEELEAISPDDDGKTRWNRYQRARVRTPQGRLVDFLRGKWGLAHLKDRKKSDLHHALDACIIAACSPAIIQRVNNYFAEEENGHGFKRNSDGTYTNRSTKKNLSKAEARERGLYLPAPWEDFHRDVRNALGKVFISRRPKRKSAGEVHDANPKGIRYLPVPLVELTEEMLTDECLREVGRRRRENYEALRMALQVTNGDAQMAFADGYEIQGKHGKLKRIYSIAMPLWSLPNDYLKQRNKALTIENAKRRKEGDAKLLYENLSKTARKTVPLTSLTQKMLTEGELGSTFYQRNKELIEALKTHLGDKKAKDAFAQPFQPPPGKSGKERPVIRSIRLPDTHGSGVLVRGGITGLGESISTEVWWTGSAYFFRPRYQADKETMFGMEDLPDGAKHIFNLRIDDPIEVVLTNGEIIPGGAFPGYFVVYEGDGRMRIRTHDRPGKTPLKTNQTEENNDDEQSNAVKDTSLRRFNTKDIKKLRKFKVDVLGRYKEVNGGSPHGLA

SEQ ID NO: 8658 - protein, 1128 aa, synthetic construct
  REGION 1..1128: note = Synthetic
MRYLVGIDVGDRSVGIAAFEVDDAGIPLRRLSFQSVRHDGGLQPGSEKSPVSRRATSGIARRMRRLIKRKRARLRKLDAKLRELGYPVPTVEVPQTYEAWHARSRLVTEQIHDERELRELVSMGLRHIARHRGWRNPYWSWSRLKQAPVPSASLQKIRVDAAATLGRDFSNGEITLGQIGWLGANRDTLIRPRENERSKKTGRTPLFNHRLMQEDHLQEIRMIWKTQGLPHRHLEALTKAIFHQEKPGVPAENVGRDSLPGRAHLRRALRSSEVFERFRLVAVLRNLRVKNAPNEEYIPLNEEQFQTLLDLLTRWHLERGQKGERPTWGDLAEVLHVELPWIRKGNFDGDPTTGVPVLDSALKLNGVFEKNKKNASEAYEWWLEASSEDRNDLIRFLDEVAEDDEDPVSEEISELVATWPEELIGALEGANLTAGRASYSEQSLQELTDLMLNERLNLHEARKKAFGVDDSWKPKPPSIQERTKQPAVDRVLAIVRQTIMGLVSKYGIPDDVVVEHARSGLMGPQARAEYQREIAANRNRRQKIANNLKTEKQVDNPTGVDIRREIVFQRQRGECLYCGSGLEGGFELDHIVSRADGGANTRENLVAACRKCNAAKHRRPFAVFAKTSSLPGVSVAEAVARVRSWQQPQLDSQRDLRRLQQRVIQRLRQTEDDEPIDDRSLASTQYSALEVRSRLQGFLDSEANKRGQSSPQVQVYSGRIVSAARKASGIDGQLRLRGAEIKSRSDYRHHAIDAAVIAMMNPSIARTLAKRESLREAHRFTNNYPDWQGFTGSTAGMRNQFESWKLRMQALAELLQESVREDRIVVKNVLRLRPERGSVHADTIAALELKTAGEEWTSKHVARIASPDVYLRFKSALGKTKTFIPANASELDDCGLKPESEIQLFRRPGPQIIVRGGSATIGDNIHHARIFSWKDRNGAMLFGVQRIFTAELPLIFGPNYKQRDLFSGEIPEWSFGHRDMQATVVKTLENGLAKQIGWFVVGDELEVDPADFEDGKDQFSRFLREMPETRWEVRGLPESRLVLVRPHYLSTEQIPSSLSKDVQQVWEKGCRVSASSLLSAPGTTFIRRASLGMPIWASNGRQQIFSFNVTQRAEHLLESDEANEVASS

SEQ ID NO: 8659 - protein, 1138 aa, synthetic construct
  REGION 1..1138: note = Synthetic
MSASSENIRGIRYRVGIDVGLRSIGFCAVEVDQRDQPVRLLNSMVFIHDAGVDPNENKAAKSRKLTAGVARRTRRLYLTRRQRLSNLDRVLAKEFGWPILDLSRFKDPLEPWHVRARLLEGYVADDEERQKALSIALRHIARHRGWRNPYANVRTLLQPTEPSDFLMGLNERISTALGRNFAADTAPGQLVDAYLAHPDYAAKAGTPKLRGPKGILAGKLHQSDNAAEIRRICDIQKISPDDRDRLICAVFEAKSPKGSAKERGLVGYDELPGQSGHVRAEKAHPAFQKFRIVSVLANLRIREGRVERPLTPDELQGLTDYLMVAGLKQEITWQDLADNLGIERADLRGTAKASFDNSPVLRRPPTDVTTEKIMACKVKWLKEWWKEADEEQRGYVVDAFSNSGGSEDTTDVNDEAAELFERASEQDQLEFEKIALPQGRAAYSLDSLRRLTERMLTEGVDLHTARCLEFPGGNDWRPPVEEIGAPTGNPAVDRVLKQVSRWLHAATDRWGEPTVINIEHARDGLGSERVARELMRANERRRKANAAAVAEMTAQLGISGKTRRSDNIRYFALQRQDCQCLYCGTMITYETAEMDHIVPRADGSSTNDRSNLAAVCRTCNHKKGAIPFAVWASSEDTNEGVSLKGALERVRMWKQESGMSSKQLKQLKREVSARLKSTKLDEEFDGRSMESVAWMAVELRTRIEGHYRKRNESTVPSVGVYRGQLTAEARKASGFENRVNLIGGRGKTRFDRRHHAMDALVIALMNPSVSRTLALRLNMRDAQRLTGREETWKNFCGKPGEATQRFEAWRESMLRAVELFNIMLSENAIPFVENIRLRVGSSVVHDATVHSFCPSRTPEGEQIPTKVCGEQYPLGSALPVELIDRAETPALWTALTRCPDFDPQKGLPEDPHRVISVNGTRVAPTDLLNFFGSSAACLKVRGGYAELGSAIHHARIYRIDGKKATYAMVRVFQVDLLRLKSQDLFTTPLKPSTISMRTAEPKIRKALAEGTATQIGWLVEGDELRIDTSKYTGGFVGDVLARYPETTSWRVAGFKTPSRLRIKPLCLSKEGFVDEKQAARLGVEATTEAIIKTVDTPGWLPAVNVLFGAGGVYVVRRNCLGEERHRPSSSLPVTTILE

SEQ ID NO: 8660 - protein, 1138 aa, synthetic construct
  REGION 1..1138: note = Synthetic
MSTSSENIPGIRYRVGIDVGLKSIGFCAVEVDRNDQPIKLLNSMVFIHDAGVDPNENKAAKSRKLTAGVARRTRRLYRTRHQRLVDLDRVLSKDFGWPLPDLSAFEHPTEPWHIRARLLEGYIADDAARQAALSIALRHIARHRGWRNPYAKVETLLQRSDPSDFLKGLNERISTSLGRQFPVDATPGQLVNAYLAHPDYVKEAGTPKLRGPEGILAGKLHQSDNAEEIRHICEMQKVDRADCDRLIRAVFQAKSPKGSAKERGLVGHDELPGQGKHVRAEKAHPAFQKFRIVSVLANLRIREGREERPLTPDELQGLTDFLLVAGLKQEVTWQDLADNLGIERSDLRGTAKASFDGSPVLRTPPTDVTTEKILACKVKWLKEWWKAADDEQRGYFVDAFSNSGGSEDSSDVNDEVAELLEQATEDDQLEFEKISLPQGRAAYSLDSLHRLTDRMLRDGVDLHTARRIEFNVGDDWKPAVEPIGAPTGNPAVDRVLKQVSRWLHAATERWGEPTVINIEHARDALGSQKVARELMQANEKRRKANAAAVAAMAEKLKLSGKIHRSDQIRYFALQRQNCQCLYCGAPITYTTAEMDHIVPRADGSSTNDRSNLAAVCRTCNHKKGKIPFAAWASSDKANDGVSLKGALERVTMWERDNGMSPKQFKQLQKEVKARLKSKKPDEEFDGRSMESVAWMAVELRTRIEGFYRTRGEESVPSVGVYRGQLTAEARKASGFESRVNLIGGRGKTRFDRRHHAMDALVIALMNPSVSRTLALRVNMRDAQRLAGLEETWKNFYGKPGEASQRFESWRESMLRGVELFNIALSDNAIPFAENIRLRVGSSVIHDATVHSFCPPKRPDGEQIITKGCGEQHRLGSALPVELIDRAETPALWTALRRCPDFDPKKGLPENPNRMISVNGRRVGPMDLLNFFGSSAACLKVRGGYVELGSSIHHARIYRIDGKKTMYAMVRVFQVDLLRLKNQDVFTTPLKPSTISMRTAEPKIRQALADGTATQIGWLVEGDELRIDTSKYSSGFIGEVLARYPEATSWRVAGFMNGTTLRLKPYLLSKEGFIDETQAARLGIEPTSEAVQKTVDTPGWLPAVNVFFGAGGVRVIRRNCLGEERWHSTASLPVSMVLE

SEQ ID NO: 8661 - protein, 1125 aa, synthetic construct
  REGION 1..1125: note = Synthetic
MLRRVARKSGPVFAPNAPAASHDYSMQINADTATSLRYRIGIDVGTHSTGFCAVQVNEHDAPVALLNSMVFMHDSGIDPDQAKYAKTRRATSGVARRTRRLYRSRRTRLAQLDEELKRLGYPIVDLETLDDPRAPWHIRARLTNEFILDEDERRRSVSIALRHIARHRGWRNPYSKVESLLIPAEPSQFLRGLGERVSDKLDILVDPEATPGEVLSVLFTSFPTAKIRGPEGILQGKLFQSDNAQEIRLIASTQRIEDDERDHLIRCVFQAKSPRGSAQGLRGKDALPGQTQHVRAEKAHPAFQLFRIVAVLTNLRIREGKAERRLSTDELQGLVDFLLIAGEGDAPSWAELADNLGIERSELRGTAKPGPDSTPALSAPPLDATHRAIIGSAIPWLIDWWISASAEERGKMIDALSNSGGSEDIPDVDDEIAEVLEQASEGDQELLDKLALPSGRAAYSLDSLQRLTECMLTTGMDLHEARKAVFGVDDSWQPPADPIGMPVGNPAVDRVTKQLARWLGAAERRWGTPESINIEHIRDALGSERAVREAMRDNEARFKRNQKMFSEMHDRLGLSGRPRRSDLIRYQALQRQNGECLYCGTPIDFTTAEMDHIVPRSGAAGSTNTRNNLAAVCRPCNHAKGNLPFAVWAESNTSRGATLADASRRVRHFLRDEGVSPKDFKRFQKDVISRLKSKSLDEEFDGRSMESVAWMASELRMRIDQHFNRGGRTVDVNVYRGALTAEARKASGFEGRLNLIGGGGKTRFDRRHHAMDALTIAMMNRSVAMTLAVRQNLRNSQQITGETETWKTFTGVTDEARKQWERWNDAMRTASDLFNLALTNNAIPIVENTRLRQGSGAMHEAKIQKLIKVPLSSALSVELIDRASTPALWTALTRCPGYDEKDGLPSDPHRSIVVNGHHIRGEELISFFNTGSACIAVRGGYAELGASIHHARIYRIDGKSPVYAMVRVYQVDLVRHRNEDLFSCEIPQSSISLRTAEKKIRQALRNGTATQIGWLVEGDELEIEMGKVASGQAESIAQGFPTVTSWRVSGFPQPKTLRLKPLLLAAEGAPESLTSDQQVVISGRGWWPAINKLGKAGSTRVIRRNALGVPRTEPTSGLPISIDLK

SEQ ID NO: 8662 - protein, 1114 aa, synthetic construct
  REGION 1..1114: note = Synthetic
MQFHFYMVYVTMKGMNDKDASQQLRYRVGIDVGTHSIGFCAVEVDESGMPIQLLNSMVHKHDSGIDPGGNDTATTRLAEAGVARRTRRLIRRRKKRLQELDAFIEECGWPLVDLATITDARSPWRIRAHLATEHIDDEAEQGKLLSIALRHMARHRGWRSPYARISSLHIQADPSEQLKALAQRVSEKTGISLTADQTPAQLISVYLDVFETGKLRGPEGILGGKLMQSDNANELRRIATVQGLDNDLLKKIIGFVFAAESPKGSAAKRVGKDVLPGAHGLRAEKAHPAFQQFRIVSIVQNLRIKEGTGLRALTSEETEIVVDFLNQAGLTEAPTWEEVADNLEIPRSHLKGTATEGFDGIAPSTRPPFDVTSQKILNGKLKKLSAWWKDADYDHRCAMVNALSNVGSDDEGSLADDDVREFLSDFTDEELEALDKVELPGGRAAYSVDSLEKLTNTMLSEGCDLHSARKIAFGVDDSWTPPAEPIGQPVGNPAVDRVLKQVARWISAATNQWGTPESVNIEHVRDALGSEKASREYQRSLQTRRIRNEKLFAEMRERLDIGGKPRRSELTRYLALQRQNCQCLYCGMPITYTDAEMDHIVPRKGAASTNTRENFAAVCRACNHQKSNLPFAVWAEKTERPGVSVKEAYKRVSDMRIEPGMNGRQMNEFRKAIRLRLTTKHADAEIDGRSLESVAWMANELRHRIEGFYRSAENDVTVRVFRGAVTAEGRRASGFESRVNLIGGKGKTRLDRRHHAMDALTIALMEPGIAQTIALRMNMRESQRVLGEQETWKSFTGGSDTARKRWEHWCEEMLRASELFNVFLAEDRIPICQNKRLRLGSSAVHKAIVQPFEASDKRIVSDAMPVELIDRASTPALWTALTRDPDFDPKEGLPANPSRTIRLHDKRLGPNETVEFFPTAAACLAIRGGYCEIGAGIHHARIFRISGKKTTYAMLRVYQCDLVRFQKENLLTVELPANTISVRTAVPKLREALAHGTAEQIGWLVVGDELKIDLSGFTTGQIETFNETYPQATRWEVTGFPTKTQLRLKPLLIASEGLADDVPDDIVKIVKGPGWWPAIDKLLKIGNVVLYRRDTHGKPRVVSHRSLPLSSKLQ

SEQ ID NO: 8663 - protein, 1113 aa, synthetic construct
  REGION 1..1113: note = Synthetic
MSASSQNVERIRYKVGIDVGLRSIGFCAVQVDADDRPVKLLNTVVHVHDAGVSPADAKKADTRKLVSGVARRTRRLYRTRKRRLVDLDRQLDGLGWPLVDPARFADPREPWFAREKLVSGRVDDADERKELLSVALRHIAHHRGWRNPYSTVESLQADAPPSEFLQGLNQRVSEKLGTELDLGLTQGQLVAQLLHRFPNAKIRGPEGILRGKLHQSDNAGELRLICRTQGLDRHITEELVRLVFQAKSPKANKEMRKRIGRDQLPGQGAHIRAEKAHPVFQRFRIVAVLANLRIREAHVDRRLTAEEMRTLTDFLLGLAGSEQPTWEELADNLNIERHQLRGTAKASVDGAPALRFPPIDATTDRIYASKLKWLAEWWRQANEERRGYMVDALSNSGGSEDEPYLDDEIAEMLEQASEEDQAKLDSLHLPGGRASYCLDTLRRLTDAMLGGGLDLFEARKAIFHVDDDWAPPTDPIGAPVGNPPVDRVLKHVARWLEAAAGRWGAPQTINIEHVREGLGSEKAARELTRMNDRRRRNNQKLVEEMGEKLGMSGRIRRSDRMRYEAIRRQNCECLYCGQPITYQTMEMDHIVPRAGAASTNSRSNLAAVCRRCNHQKGKLPFAVWAESQDSPAEVRLQDAVQRVRHWLRDAGMGQKELQVLRVQVIARLKSKRPDEEFDGRSMESVAWMANELRARVEAQYRGSGTTVRVYRGALTAEARKASGFEGRVNLIGGRGKDRFDRRHHAMDALVIALMNQSVAQTLALRLNMRDSQWLTQSEQTWRQFHGAPGEAARKWEAWDRAMRDASDLFNLALDGGRIPITENVRLRVGNGRVHEDGVIRFKPEYEVKGKTIKGGEARLLGDSLPSELIDRAATPALWTALTRLPEYDRKSGLPENPDRVIRVNGSVVQATDRIRFFGTPASVAVRGGYAKLGESIHHARIYRINGKTPKYAMIRVYTIDLMRFNHEDIFTAVLKPSTISMRCAEKKLKHAIVEGNAEQIGWLVEGDQLELDAAAYAKGVGADLMREYPMATCWRVAGFPDEAKLRLRPVLLAAEGMGEDAPKFVREVLEKQGWRPAVNALLSPGSVRVVRRNVLGEPRFKSSGHLPTTVDLV

SEQ ID NO: 8664 - protein, 1103 aa, synthetic construct
  REGION 1..1103: note = Synthetic
MIGNMTINDDNNPHPIYRIGIDVGTHSTGFCAVEVDDSGSPLRLLNSVVFMHDSGIDPAGAKKAETRKAVSGVARRTRRLYRSRRTRLFELDKTLRRLEYPLIDLESIEDPRAPWHVRSRLTHEFISDEVERREAISIALRHIARHRGWRNPYSKVESLLIPTEPSEFLTGLNQRIGEKLGENLDPDLTPGELMSRLFVAFPTARIRGPKGILNGKLHQSDNAQEIRLIAEMQDIDDEERDLLIRTVFDAKSPRGSAQGLRGKDALPGQHHHVRAEKAHPVFQLFRIVGVLTNLRIREGREERRLTPDELRGLVDYLEVTGAGDTPTWGDIADNLGVERSALRGTASPGPDGSPALSSPPINVTDRAIAASKIPWLVDWWTSASSDERGRMVDALSNSGGSEDTPDADDEIAEILEQASEQDQEKLDAISLPAGRAAYSLDSMRRLSEYMLANGADLHEARKAVFNVDDSWRPPADPIGAPVGNPAVDRVTKQVARWLSGVERQWGPPQAINIEHVRHALGSERAVREAMRDNETRFKRNQRMFTKMHEQLGLSGRPRRSDLIRYQALQRQNGQCLYCGCMITFDTAEMDHIVPRAGSGSTNTRMNLAAVCRTCNHTKSKMPFAVWAATDSRPEVSLKEAEQRVRHWLRDEGVSARDHKRFQNEVIRRLRTTTQDEEFDGRSLESVAWMANELRNRIDQHFNAHDRLVDVAVYRGSLTAEARKASGLERRVNLIGTGGKTRFDRRHHAMDALTIALMNRSVAASLALRTNLRDSQRITREPETWKSFTGTTEEARRQWSLWDDAMRRASDLFNIALTEDAIPIVENIRLRQGSGAMHEATISPLTRVALSSAMPVDLVDRASTPALWTALTRLPDFDDQQGLPADENREIVVNGRHIRASEDVSFFDTDAACIAVRGGYAQLGASIHHARIFRIEGKKTTYAMVRVYQVDLVKHRNEDLFTVELSPSTISIRTAEQKIRRALEDGTATQIGWLVEGDELRIDSSAFTSAAIGEFFSAYPMCQSWRVAGFPGLARLRLRPLALASEGMPDDASAGIKEIIAGQGWRPAVNAVLKSGSVHVVRRDALGRPRYRRTSTLPLSQPLI

SEQ ID NO: 8665 - protein, 1103 aa, synthetic construct
  REGION 1..1103: note = Synthetic
MTKINDDLRYRVGIDVGLKSIGFCAVEVDENDQPLRLLNSMVFVHDAGVDPNENKAAKSRKLTAGVARRTQRGTAQNRRRLAELDRALSEELNWPLPNLEDFEDSYEPWHTRAELVEHYIKDDAERAEALAIAIRHIARHRGWRNPYLSVDSLLTPQEPSKFLRGLNERVTQALGREFPADATPGQLICAYIDSPKYAETQGIRGDSGILSGKLHQFDNVGEIRKICEVQRLDHDVFKLLVRKVFFAKSPRGSAAGLVGHDQIPGQGKYIRAEKAHPDFQLFRIVAVLTNLRIREGKAERCLTPDELRGLVDYILEVQLKQQVTWADLADNLGIERTDLRGTARASFDGSPALRFPPTDVTAEKIMASKVKWLKDWWDKADSERRGFMVDALSNSGGSTGDNDIDDEVAALLEAATEDEQAELEKIQLPQGRAAYSLDSLRRLTKRMLEEGVDLHTARKEEFNVDDDWRPEPEPIEAPVGNPAVDRVLKQVARWLNMATDRWGVPDVINIEHTRDGLGSEKVARELLRESQKRQDLNQKDMDKMIRELGISGKARRSSLIKYQAIQRQNSMCLYCGTEIGFETAEMDHIVPRALSGSTNDRSNLAAVCRACNHQKGAVPFAVWATSGEAHAGVSLEDAIKRVRLWQKGPGMSPKQHKAFQNEVISRLKSRKPDEEFDGRSMESVAWMAVELRTRIDGYYRKVNSDSVPKVGIYRGQLTAEARKASGFENRVNLIGGKGKTRFDRRHHAMDALVIAMMNQSVSQTLALRVNMRESQRITGQEETWKNFYGKPGQASERFEKWREGMLRAVELFNIELAKNAIPFHENVRLRVGSSKVHDDTVRKFIHAKLGEALSVAMIDCAETPALWTALTRLPDFDPKDGLPEDLSREIYIHSRKITADEQLNFFNSPSACLKVRGGYVEIGSSIHHARVYRIDGKKTTYSMVRVFATDLVKMTHEDVFTTPLKPSTISMRTADPKIRKALADGTATQIGWLVEGDELQLETDKYSGGLIGEVLAEYPQLTSWRVAGFYGVTQLRLRPYMLAAEGIPSDASESLRKVIEGKGWLPAINALLSSGCVKVVRRNCLGEPRFNAKSSLPVSQLLR

SEQ ID NO: 8666 - protein, 1103 aa, synthetic construct
  REGION 1..1103: note = Synthetic
MTKINDDLRYRVGIDVGLKSIGFCAVEVDDKDQPLRLLNSMVFIHDAGVDPNENKAAKSRKLTAGVARRTQRRTAQNRRRLAELDRVLSEELHWPLPNLEDFEDPYEPWHTRAELVDHYIEDESERLEALSIAVRHMARHRGWRNPYIKVDSLLTPVEPSEFLRGLNERVGEALGREFPEETTPGQLISEYMSDPKYRESNGIRGDDGILQGKLHQYDNTAEIRKICEIQRLDHDVFKLLVRKVFFAKSPRGSAAGLVGHDQLPGQGKFIRAEKAHPDFQLFRIVSVLTNLRVREAGAERCLTPEELSGLTDFLLDAGLKQQVTWADLADNLGIERADLRGTARPSVDGEPALRFPPTDVTTEMIMASKVKWLKEWWKSADSERRGFMVDALSNSGGSTGDDDIDDEVAELLEAATEDEQAELEKIQLPQGRAAYSLDSLRKLTERMLAEGADLHTARKQLFNVDDDWRPEPEPIEAPVGNPAVDRVLKQVARWLNMATDRWGEPVVINIEHTRDGLGSEKVARELLRESQRRQDLNQKNMDEMIQQLGISGKARRSALVKHQAIQRQNSMCLYCGTAIGFETAEMDHIVPRASSGSSNERSNLAAVCRTCNHQKGAVPFAVWATSGQAHAGVSLEGAIERVRAWERDPAMSPKQYAHFRKEVISRLKSRKPDEEFDGRSMESVAWMAIELRTRIDGFYRKLKAESVPSIGIYRGQLTAEARKASGFENRVNLIGGKGKTRFDRRHHAMDALVIALMNQSVSQTLALRVNMRESQRITGQEETWKNFYGKPGQASERFEQWREGMLRAVELFNIELAKNAIPFHENVRLRVGSSKVHDDTVRKFIHAKLGEALSVAMIDRAETPALWTALTRLPDFDPKEGLPEDQSREIYIHGRKITADEELNFFNSPSACLKVRGGYVEIGSSIHHARVYRIDGKKTTYAMVRVFATDLVKMTHEDVFTTPLKASTISMRTAEPKIRKALADGTATQIGWLVEGDELQIETDKYTSGSVGNVLAQYPQLISWRVAGFYGVTQLRLRPYMLAAEGIPSDASDSLRKVVEGKGWLPAINTLLSSGDVWVVRRNSLGEVRFSTKDSLPVTHLLR

SEQ ID NO: 8667 - protein, 1102 aa, synthetic construct
  REGION 1..1102: note = Synthetic
MTKIKDDLRYRVGIDVGLKSIGFCAVEVDENDQPLRLLNSMVFVHDAGVDPNENKAKSRKLTAGVARRIQRRVRQNRRRLAELDRALSEELNWPLPNLEDFEDPYEPWHTRAELVDHYIEDESERLEALSIAIRHMARHRGWRNPYIKVESLLTPMEPSEFLCRLNERVSEALGREFPADATPGQLISAYISAPNYKETTGIRGDDGILQGKLYQDDNAAEIRKICEVQRLDLDVFELLVRKVFFAKSPRGSAAGLVGHDELPGQEKHIRAEKAHPDFQLFRIVSVLTNLRIHEGGVERCLTPDELRGLTDFLLIAGLKQRVTWADLADNLGIERADLRGTARPSVDGEPALRFPPTDVTTEKIMASKVKWLKEWWKSADSERRGYMVDALSNSGGSTDDNDLDDEVVELLERATEVEQTELEKIQLPQGRAAYSLDSLRKLTERMLSEGVDLHTARKQLFNVDDDWRPEPEAIEAPVGNPAVDRVLKQVARWLNMATDRWGTPDVINIEHTRDGLGSEKVARKLLRESQKRQDLNQKNMDEMIRQLGISGKARRSSLLKYQAIQRQNSMCLYCGTDIDFKTAEMDHIVPRANSGSSNERSNLAAVCGACNRQKNATPFAAWATSGRARAGVSLDGAIERVRAWERDPGMSSKQYAHFRREVISRLKSRKPDEEFDGRSMESVAWMAIELRTRIDGFYRKLKAESTPSIGIYRGQLTAEARKASGFENRVNLIGGKGKTRFDRRHHAMDALVIALMNQSVSQTLALRVNMRESQRITGKEETWKNFYGKPGQASERFEQWCNSMLRAVELFNTELAKNAVPFVENVRLRVGSSKVHDDTVRKFTHAKLGAALSTDVIDRAETPALWTALTRLPDFDPKDGLPEDPSREIYIHGRKITADEQLNFFNSPSACLTVRGGYVEIGSSIHHARVYRIDGKKTTYSMVRVFATDLVKMTHEDVFTTPLKPSTISMRTAESKIRKALADGTATQIGWLVEGDELQLETDKYSGGFIGDVLAEYPQLTSWRVAGFPDIAKFRLRPYLLSAEGIPADASDGLREIIERKGWRPAVNVLLTSGTVKVIRRNCLGEPRYSSVNSLPVSQLLR

SEQ ID NO: 8668 - protein, 1101 aa, synthetic construct
  REGION 1..1101: note = Synthetic
MGIIENEAGNHLRYRIGIDVGSHSTGYAAVEVDDSGMPVSILNSVVFMHDSGIDPDGAKFAQTRKARSGFARRARRLVRARKKRLKNLDETLMQLGYPLVDLETLTDPHAPWHIRAALTDHFIEDPEERLKSISIAIRHIARHRGWRSPYAKIETLFVTAEPSEFLVALNSRVGAALGQTLPPDLTPGEVISQYLTDFPEGRIRGAEGILSGKLHQTDNAQEIRLIAQTQKLSDDDLNILLRKVFYAKSPRGSASALRGKDALPGQGALPRAEKAHPVFQLFRIAGVLTNLRIVQGGVSRQLDPDELSLLVDLLTDSNRSDDLSWADVAETLGVSRRELRGTAKEGVDGAPSLSRPPIDVTDRAIRESKIPWLVEWWDSADLVRRGLMIDALSNSGGSQIDTEIDDEIAEVLEQATETDQEKFEKINLPSGRAAYSLDSMSRLTDAMLEMGIDLHEARKYVFRVDDTWTPPADPIGLPVGNPAVDRVTKQINRWLMGIESRFGTPESIYIEHVRNALGSEKVRREYERDIERRRKANMATYESMREQLNISGRTRRSELIRYQAIQRQGGNCAYCGCAIDFRTAEMDHIVPRAGAGSTNTRSNLLAVCRRCNHSKGKMPFAVWAATTSNDKVSLENVIQAIRVWERDSGMTAQAFNRFKREVIERLTLTTPDDEIDGRSLESVAWMASELRHRIDAHFNRQERIVDVAVFRGSLTASARKASGFENRVNLIGGHGKTRFDRRHHAMDAVVIALMDRSVAKTLAERDSIRDAQRISGEAETWKSYTGATVATQQRWNRWKDSMLRAVELFNLALTDDAIPILENMRLRQGSGAIHEATISELSKVALGAELSSELIDRAATPALWTALTRHPDYNPSTGLPADSNRHIRVNGTHFRADDKLPFFKSSSASVMVRGGSAQLGNAIHHARIYRIEGKKKPIYAMLRVYQIDLAKVQDRDLFTAPLAPSTISVRTAEPKLRTALASGTASYIGWLVEGDELRLDPSSFNTHAIGTFFSEYPRCQSWRIAGFPSPSRFRLRPMVLSGEGLPEGAGEAIQTITFDRGWLSTVNTLLSTTELQVVRRNALGERRITQKTSLPSSYVLR

SEQ ID NO: 8669 - protein, 1095 aa, synthetic construct
  REGION 1..1095: note = Synthetic
MEQEAMTQRHYRAGIDVGTNSIGFSLVEVDDDGYPTDLTNSVVVIHDSGVDPDAQDAGDSRRAVSGVARRARRLYKRAKKRLDRLDAYIESLGWPLIDLESYQDPRRAWSIRAALANEQITDSTVLHEYLSVAMVHIAHHRGWRNPYQRVESLLREQEPSSKLEGLRKRVENLIGRNLSEDLTAGQLINEALRVNPQTKLRGSSGLLGGTLLQSDYVIEIRKIQETQGLSRALVDELIRRVFDSVSPVGSARERVGKDALPGQQQKPRAEKAQPAFQVFRIVSVVANLRIGKGREQRILSKQEKDTVVDFLLHSSVPEQITWDAVAELLKIERPSLRGVARAGIDGENVSGRPPTDATNQVIRSLKIPTLQEWWEQADEIAQETFIDLRSNVGSDDLDPDSLQEITRLISAFSDDEREKLEEATFPMGRAVYSVDSLRRLTECMREDGIDLYEARRKEFGVSEDWEPPAEDIGAPVGNPSVDRVTKQVARWLSAVEKRWGVPDSINIENVRDGFSSEHVTREIMLQNKKSQERNERIVHEIHERRGIDGPVRRSDIIRYKVFSRQEGICLYCGEPLSIENFEVDHIVPRSGPSSTNKMHNLAAVCRTCNHQKSGMPFALWAENSDRDGVSLEGAINRVGMWLPDPGMSRKDFGRQKQETIRRLKRKQIDEPLDDRSMESVAWMANELRRRIDYHFNHEEKKTVVRVFRGSLTAEARRASGLEGKVKLIGGHGKTRFDRRHHAMDALTIALLRPSVAHTLVLRQNIRYAERLTQSPQTWKEFTGLTIADRQIWNHWLQEMDLATEYFNSRISADTIPVMQNLRLKLGNGAAHKAKIGKLEHVKLSDAMPVQSIDRASTPALWWVLTHQPDFDRESGLPADPSRRIVVNGVHYTGESAVDLFPKLVPAVKVRNGWASTSSSIHHVRIFKVDGKKPKYYQLRVFKTDLIPYAHEDLFTVQIPAKSISVRTALPALRKAIASGQARQVGWLVRGDELRLRATNFTKGKIADFFQDFPDMVSWRVTGFESTRQINLRPSLLALEGAPEQISPAVLEILNRSWRPTFSDLFTNGNPVIIRRNALGEPREASNSGLPLSMTL

SEQ ID NO: 8670 - protein, 1142 aa, synthetic construct
  REGION 1..1142: note = Synthetic
MIDSSENVPGIRYRVGIDVGLKSIGFCAVEVDRNDQPVRMLNSMVFIHDAGVDPNENKAAKSRKLTAGVARRTRRLYRTRHQRLVNLDRVLSKEFGWPLPDLTSFKDPREPWHVRAGLLEGYIADDEKRKEALSIALRHIARHRGWRNPYAKVETLLQPSEPSDFLKGLNERISTALRTTFSAEATPGQLIDAYLAHPDYVGRAGTPKLRGPQGILAGKLHQSDNAQEIRRICDVQRIEPAERDRLIRVVFEAKSPKGSAKERGLVGYDELPGQGRHVRAEKAHPAFQLFRMVSVLANLRIREGREERPLTPDELQGLVDFINEVSLKQEITWQDLADNLGIERSDLRGTAKASFDGSPVLRNPPTDVTTEKIMACKVKWLKEWWKEADDEQRGYMVDAFSNSGGSEDGTDVNDEVAELLEQATEDDQLEFEKISLPQGRAAYSLDSLRRLTDRMLRDGVDLHTARRLEFNVGDDWKPAVEPIGAPTGNPAVDRVLKQVSRWLHAATERWGEPTVINIEHARDGLGSERVARELMRENEKRRKANASAVAEMAAKLKLSGKVHRSDQIRYFALQRQNCQCLYCGAPITYTTAEMDHIVPRADGSSTNDRSNLAAVCRTCNHMKGKIPFAVWASSDKANQGVSLTGALERVNMWQRDNGMSPRQLKQLQREVCARLKSKKPDQEFDGRSMESVAWMAVELRTRIEGFYRSRDEESVPSVGVYRGQLTAEARKASGFESRVNLIGGRGKTRFDRRHHAMDALVIALMNPSVSRTLALRLNMRDAQRLTGVEETWKHFYGKPGEASKRFESWRESMLRGVELFNIALSDNAIPFVENIRLRVGSSVIHDATVRSFCPPKTPDGKQTITKGRGEQHALGSAMPVELIDRAETPALWTALTRCPDFDPKKGLPENPQRTISVNGTRVGPTELVNFFEFSKSGPKACLKVRGGYVDLSGAIHHARIYRIAGKKTAYAMIRVFQVDLLRLKDHDVFTTPLKPSTISMRTAEPKIREALANGTATQIGWLVEGDELVIDTSKYSGGFIGEVLARYPEATSWRVAGFMTPAKLRIKPILLSKEGFVDETQAALLGIEATSEAIQKTVDRPGWLPAVNVLFGAGGVRVIRRNCLGEERYHSSASLPVSMTLE

SEQ ID NO: 8671 - protein, 1801 aa, synthetic construct
  REGION 1..1801: note = Synthetic
LRVLEGTLAQEREHQDDHEEDGDDDEGGGPGGQHQGQENLGSVQRPAQQEEGEDRGANQQGRPLAALGHEGTKLRLVELDLVAHDAGDLTGDRREEGADAGPSRGAAGSGVGGRGVLPGLGGGLCHGGSCACGRHEALPRLIRLVSHEGWLLAVTCALLPGRDGTGQVGEDLAGTNHQFGHLGFGQGWVLRLDNGNAAHRCFGAGLAHAHRSARLGVRDGSVLGGLGVEALRGGLGVGSGGGGALGPGVRGLVGGRGGGEGVEDLRVLGVCLQGGGDQLDGGTGRVEGDVAVREEDRAVGGGRDLRVGRGQDDGAPRRGEAAQEAVEVGAVGLGQGRGVFNEEDLGPGDDRARDERLDVLPRRELRGAQVDALGQARDLEGAHEVVPVGHGAGRREGGQDVLADRQGLVQGRVGSDQRDRTDATGQARREGTGRGGDDAAGLRLLEPRQDEEEGAGASARRIQDGAQRARAEPQVDARQEDDAGLVVRVGHAQARDLDASAAPLRGKGAAGAIPRARLGRGRAGRERGEGGLGGGGRDLGGARPRGGGGLGVSGPSGGRQVGRLLIFDTVQVLTRVIRHDPILSASCRLCRNGAREGVGWARGQVRHEVACVSCLAVLCCKRLILSKSRLVSGSECSTGSFFARDPVFFRNPPEVCVGCATIGCMTYAANDKAIRYRVGIDVGLRSIGFCAVEVDEHDQPLNLLNSTVFIHDAGVDPNENKAAKSRKLTAGVARRTRRLYQTRRQRLARLDRVLANEFGWPIIDLTRVEDPREPWRVRAQLLEGYIEDRDERNRALSIAARHIARHRGWRNPYADVRTLLQSAEPGDFLKGLNERVSTALRTSYPADATPGQLVNAYLSHPDYAGKAGTPKIRGPKGILAGKLHQSDNAAEIRRICGVQKVSADERDQLIRAVFDAKSPKGSAKERGLVGNDELPGQSKHVRAEKAHPVFQRFRIVSVLANLRIREGRAERRLTADELAGLTDFLMIAGLKQAVTWQDLADNLGIERADLRGTAKASFDNSPVLRNPPTDVTTEKILACKVKWLKEWWKEADEEQRGYMVDAFSNSGGSEDLTDVNDEVAELLEQASEEDQSEFEKIALPQGRAAYSLDSLRRLTDRMLADGVDLHEARRIEFGVGDDWKPAVEPIEAPTGNPAVDRVLKQVSRWLHAATDRWGEPTVINIEHARDGLGSERVARELMQANERRRKANAAAVASMAEKLNISGKIHRSDQIRYFALTRQNCQCLYCGTAITYSTAEMDHIVPRADGSSTNDRSNLAAVCRTCNHRKGAIPFAVWATSEDANEGVSLSGALERVSMWQRENGMSPKQFKQLQREVKARLKSKKPDEEFDGRSMESVSWMAVELRTRVEGFYRERDGERVPSVGVYRGQLTAEARKASGFENRVNLIGGRGKTRLDRRHHAMDALVIALMNPSVSQTLALRLNMRDAQRLTGREETWKNFYGKPGAASQRFETWRESMLRAVELFNIRLSENTIPFVENIRLRVGSSAMHDATVHSFRPRRNTAGELIQEKGCGEQHPLSSALAVELIDRAETPALWTALTRCPDFDPKKGLPENPNRVISVNGTRVGPDDLLNFFGSSAACVKVRGGYAELGNSIHHARIYRIDGKKTVYAMVRVFQVDLLRLRKQDVFTAPLKPSTISMRTAEPKIRQALAEGSATQIGWLVEGDELQIETDKYTGGFVGQLLERYPEATSWRVAGFMNARQLRIKPLLLSKEGFVDESMARKLGIEETPEAVRKTVDAPGWVPAVNALLCAGRVRVVRRNCLGEERYGSATSLPVTIVLE

SEQ ID NO: 8672 - protein, 1121 aa, synthetic construct
  REGION 1..1121: note = Synthetic
MLHRAVLRDGPVLHSNAFAGWHDVPMAFDEEVKSQVCYRVGIDVGTHSTGFCAVEVDSGGMPLRLLNSMVFMHDSGIDPDGAKKAETRKAMSGAARRTRRLYRTRRSRLADLDRTLTKLGYPIVDLESLEDPRAPWFIRAQISQELVRDDEERRRAISVALRHIARHRGWRNPYSKVDSLLVHAGPSEFLVALIERVSNALNRPIAPNSTPGEVIAQYLTSHPTAKLRGPEGILSGKLHQSDNAQEIRRIGECQGLGEKEIEALIRSVFQAKSPRGSAQGLRGKDALPGQERLPRAERAHPVFQLFRIVGVLANLRIREDGMTRALTPDELRGLTDFLLADPKGEAITWGDLADNLGIERSQLRGTAAQGPDGAAALSYPPKDVTDREIRTSKIPWLVSWWTEADEDSRGRMVDALSNSGGSEIDFEVDDEVAEVLEQASEEDQEKLEKLALPSGRAAYSLDSMRRLTSVMLERGVDLHEARKIVFGVDDSWCPPAEPIGAPVGNPAVDRVTKQVARWLYAAEKKWGVPESINIEHVRDALGSKHAARENERRHRRNQKMYEEMHTQLQLSGRPRRSDLIRYQALQRQNGQCLYCGDEITFITAEIDHIVPRAGAASTNTRTNLAAVCRACNHSKGKLPFAVWANSKDGRLEVSLAEVKERVRMWNPDSGMSKSELRRFQKEVLRRLTVKNPDEAIDARSMESVAWMANELRHRIEQYFLRGEGGSTVSVYRGALTAEARKASGFENRVNLIGGGGKTRFDRRHHAMDALVIALMNPSIAQTLALRMNLRDSQRIAGKQETWKGYHGEPGAATEKWLKWDESMRAASELFNLALAADTIPILENIRLRQGSGAMHEAGISKLKRARLGDALSAQLINRASTPALWTALTRCPDYDEQAGLPEDDSRQIVVNGRHFGPDDVLEFFDSPAACVAVRGGYAQLGASIHHARIYRIEGKKPVYGMLRVYQVDLVKHRKDDLFTVSLPVSSISVRTAEAKVSKAIAEGTATQIAWLVEGDELKIDVSAFGTGTVGELVEAYPMCTSWRVAGFPDRDKLRLRPYLLSREGIPEESSKGVREILEGKGWRPAVSKLFQIGSVHLIRRTVLGTPRVSGRAHLPSSVEVI

SEQ ID NO: 8673 - protein, 1101 aa, synthetic construct
  REGION 1..1101: note = Synthetic
MTKINDDLRYRVGIDVGLKSIGFCAVEVDDKDQPLRLLNSMVFIHDAGVDPNENKAAKSRKLTAGVARRTQRGTAQNRRRLVELDRVLSEVLHWPLPNLEDFEDPCEPWHTRAELVDHYIEDESERLEALSIAVRHMARHRGWRNPYIKVDSLLTPVEPSEFLRGLNERVGEALGREFPEETTPGQLISEYMSDPKYRESNGIRGDDGILQGKLHQCDNTAEIRKICEIQRLDHDVFKLLVRKVFFAKSPRGSAAGLVGHDQLPGQGKFIRAEKAHPDFQLFRIVSVLTNLRVREGRAERCLTPQELQGLTEFIIRVQLKQQVTWADLADNLGIERADLRGTARASFDGSPALRFPPTDVTTEKIMASKVKWLKDWWKSADSERRGFMVDALSNSGGSTGDNDIDDEVAELLEHATEDEQVELEKIQLPQGRAAYSLDSLRKLTERMLAEGVDLHTARKQLFNVDDDWRPEPEPIEAPVGNPAVDRVLKQVARWLNMATDRWGEPVVINIEHTRDGLGSEKVARELLLEGKRRQELNQKNLVEIAQQLGIPVKDKRSALIKYAAIQRQNSMCLYCGAEIGLTTVEMDHIVPRALSGSTNDRSNLAAVCRACNHQKGAVPFAVWATSGEAHAGVSLEDAIKRVGMWQRGPGMSPKQHKAFQREVIARLKSRTPDEEFDGRSMESVAWMAIELRTRIDGFYRKLKAESIPSIGIYRGQLTAEARKASGFENRVNLIGGKGKTRFDRRHHAMDALVIAMMNQSVSQTLALRVNMRESQRITGQEETWKNFYGKPGQASERFEQWREGMLRAVELFNVALVENKIPFHENVRLRVGSSKAHGDRIRKFIHAKLGEALSVAMIDRAETPALWTALTRLPDFDFKEGLPEDDSRVIYLHGRKITANERLNFFGTSAACIKVRSGYAKLETSLHHARIYRITGQKTRYAMVRVFEADLLRMTHEDVFTAPLKESAISVRTAGSTIRKALREGTATQIGWLVRGDELLIENLRLEEGEAAVLCAKYPQATSWSVDGFEDNRRLKLRPLLLSTEGIPVDEDPVIVGTIKDSWRASLDQLLSHANVTIVRRNALGEIRTRGSSLPTTTRLS

SEQ ID NO: 8674 - protein, 1132 aa, synthetic construct
  REGION 1..1132: note = Synthetic
MVTSSENIPGIRYRVGIDVGLKSIGFCAVEVDRNDHPVKLLNSMVFIHDAGVDPNENKAAKSRKLTAGVARRTRRLYRTRHQRLVNLDRVLSKEFGWPLPDLTAFKDPREPWHVRARLLEGYIADDDKRKAALSIALRHMARHRGWRNPYAKVETLLQPAEPSDFLNGLNERISTSLGRSFPADATPGQLVDAYLAHPDYVKKAGTPKLRGPEGILAGKLHQSDNAEEIRRICEVQQIDPADRDRLIRAVFQAKSPKGSAKERGLVGHDELPGQGKHVRAEKAHPVFQKFRIVSVLANLRIREGRAERPLTPEELQGLTDFLLIAGLKQEVTWQDLADNLGIERSDLRGTAKASFDGSPVLRNPPTDVTTEKILACKVKWLKEWWKDADDEQRGYFVDAFSNSGGSEDTSDVNDEVAELLEQATEDDQLEFEKISLPQGRAAYSLDSLRRLTDRMLRDGVDLHTARRLEFNVGDDWKPAVEPIGAPTGNPAVDRVLKQVSRWLHAATERWGEPTVINIEHARDGLGSERVARELMRENDRRRSANAAAVAEMAAQLKLSGRVRRSDQIRYFALQRQNNECLYCGTEITFTTAEMDHIVPRADGSSTNDRSNLAAVCRTCNHKKGAIPFAAWASSDQANKGVSLKGALDRVKFWVRDNGMSPKQFKQLQREVSARLKSRKPDEEFDGRSMESVAWMAVELRTRIEGFYRTRDEESVPSVCVYRGQLTAEARKASGFESRVNLIGGRGKTRFDRRHHAMDALVIALMNPSVSRTLALRVNMRDAQRIAGLEETWKNFYGKPGEASNRFESWRESMLRGVEFFNIALSDNAIPFVENIRLRVGSSVIHDATVHSFCPPKTPDGEQIITKGYGEQHRLGDALPVELIDRAETPALWTALTRCPDFDPKKGLPENPNRTISVNGTRVGPMELLNFFEYSKEGIKACLKVRGGYVELGSSIHHARIYRIDGKKTAYAMVRVFQVDLMRMKDRDVFTMPLKSSTISMRTAEPKIRQALANGTAAQIGWLVRGDELLVDTLAYPDGKIGRVMTKYPEAIHWKVAGFPEPKKIKMRPYLLSKEGLSEDMEESIRTVVDTKGWITTIQKLLEAGEVQVIRRNCLGEERWCSSVSLPVSMILE

SEQ ID NO: 8675 - protein, 1138 aa, synthetic construct
  REGION 1..1138: note = Synthetic
MINSSENIPGIRYRVGIDVGLKSIGFCAVEVDRNDQPVKLLNSMVFIHDAGVDPNENKAAKSRKLTAGVARRTRRLYRTRHQRLVNLDRVLSKEFGWPLPDLTACKDPREPWHVRSRLLEGYIADEAKRKAALSVALRHMARHRGWRNPYAKVETLLQPAEPSDFLKGLNERISTSLGRSFPADATPGQLVDAYLAHPDYVQKAGTPKLRGPNGILAGKLHQSDNAEEIRRICEVQQIDPADRDRLIRAVFQAKSPKGSAKERGLVGHDELPGQGKHVRAEKAHPAFQKFRIVSVLANLRIREGRAERALTPEELQGLTDFLLVAGLKQEVTWQDLADNLGIERSDLRGTAKASFDGSPVLRNPPTDVTTEKILACKVKWLKEWWKDADDEQRGYFVDAFSNSGGSEDSGDVNDEVAELLEQATEDDQLEFEKISLPQGRAAYSLDSLRRLTDRMLRDGVDLHTARRLEFNVGDDWKPAVEPIGALTGNPAVDRVLKQVSRWLHAATERWGEPTVINIEHARDGLGSERVARELMRENDRRRSANAAAVAKMAAQLKLSGKVRRSDQIRYFALQRQNCQCLYCGTDITFMTAEMDHIVPRADGSSTNDRSNLAAVCRTCNHKKGAIPFAAWASSDQANTGVSLEGALERVKMWQRDNGMSPKQFKQLQREVSARLKSRKPDEEFDGRSMESVAWMAVELRTRIEGFYRTRDEEAVPSVGVYRGQLTAEARKASGFESRVNLIGGRGKTRFDRRHHAMDALVIALMNPSVSRTLALRVNIRDAQRLAGVEETWKNFYGKPGEASQRFESWRESMLRGVELFNIALSDNAIPFVENIRLRVGSSVIHDATVHSFCPPKTPDGEQIITKGYGEQHRLGDALPVELIDRAETPALWTALTRCSDFDPKKGLPENSNRTISVNGTRVGPTELLNFFGSSAACLKVRGGYVELGSSIHHARIYRIDGKKTAYAMVRVFQVDLLRLKDQDLFTTPLKPSTISVRTADKKIRKALIEGTATQIGWLVEGDELQIDVSKFSGGFIGDLLAQYPQISNWRVAGFMNGTQLRLKPLLLSKEGFVDEKQAVRLGIEPTAEAIQKTVDTPGWLPAANVLLGSGGVYVVRRNCLGEERLQSSGSLPVTMMLE

SEQ ID NO: 8676 - protein, 1128 aa, synthetic construct
  REGION 1..1128: note = Synthetic
MITSSENVPGIRYRVGIDVGLKSIGFCAVEVDQYDQPVKLLNSMVFVHDAGVDPNENKAAKSRKLTAGVARRTRRLYRTRHQRLVNLDRVLSQEFGWPLPDFASFKYPTEPWHVRARLMDGYISDEEERKEALSIALRHIARHRGWRNPYAKVETLLQPAEPSDFLKGLNERISTALKRTFPADATPGQLVDAYLAHPDYVKEPGTPKLRGPEGILKGKLHQSDNAEEIRRICEVQKIAPSERDRLIRAVFEAKSPKGSAKERGLVGYDELPGQGKHVRAEKAHPAFQKFRIVSVLANLRIREGREERPLTPDELEGLVDFIDQVSLKQEVTWQDLADNLGIERSDLRGTAKASFDGSPVLRNPPTDVTSEKIMACKVKWLREWWKNADDEQRGCFVDAFSNSGGSEDGTDVNDEVAELLEQATEEDQLEFEKISLPQGRAAYSLDSLRRLTHRMLSEGVDLHTARRMEFNVGDDWKPAVEPIGAPTGNPAVDRVLKQVSRWLHAATERWGEPTVINIEHARDGLGSEKVARELMRDNEKRRKANAAAVADMAQQLGLSGKVRRSDQIRYFALQRQNCQCLYCGAPITYTTAEMDHIVPRADGSSTNDRSNLAAVCRTCNHKKGKIPFAAWASSDKANTGVSLQGALDRVKMWERDNGMSPKQFKQLQREVSARLKSKKPDEEFDGRSMESVAWMAVELRTRIEGFYRSRNEEFVPSVGVYRGQLTAEARKASGFESRVNLIGGRGKTRFDRRHHAMDALVIALMNPSVSRTLALRLNMRDAQRLTGVEETWKNFYGKPGEASKRFEAWRESMLHGVELFNIALSDNAIPFLENKRLSMNSSAVHEDTLFSFSHARPVEKGSKTLKEKGQQRELGSAMSVELIDRAETSALWTALTRRPDFDPKKGLPENPSRSISVNGTRVGSTELVNFFGTSSACLKVRGGYVKLANSIHHARIYRIDGKKTSYAMVRVFQVDLLRLKHQDLFTTPLKPSTISIRTAEAKIRRALADGTATQIGWLVEGDELRIDTSKYRGGFIGEVLAKYPEAVNWRVAGFADKAQLRLRPYLLAGEGLESDAMQGMKELLEGKGWRPSVNVLFAPGSVEVVRRNCLGEERKVLGRGLPASALMR

SEQ ID NO: 8677 - protein, 1132 aa, synthetic construct
  REGION 1..1132: note = Synthetic
MSTSSENIPGIRYRVGIDVGLKSIGFCAVEVDRHDQPIKLLNSMVFIHDAGVDPNENKAAKSRKLTAGVARRTRRLYRTRHQRLVNLDRVLSKEFGWPLPDLSAFKYPTEPWHVRARLLEGYIADDEKRQAALSIALRHIARHRGWRNPYAKVETLLQATEPSDFLKGLNERISASLGRQFPVDTTPGQLVNAYLAHPDYDKEVGTPKLRGPEGILAGKLHQSDNAEEIRRICEMQKIDRAYCDRLIRAVFQAKSPKGSAKERGLVGHDELPGQGKHVRAEKAHPAFQKFRIVSVLANLRIREGREERPLTPDELQGLTDFLLVAGLKQEVTWQDLADNLGIERSDLRGTAKASFDGSPVLRTPPTDVTTEKILACKIKWLKEWWKEADDEQRGYFVDAFSNSGGSEDSSDVNDEVAELLEQATEDDQLEFEKISLPQGRAAYSLDSLRRLTDRMLRDGVDLHTARRIEFNVGDDWKPAVEPIEAPTGNPAVDRVLKQVSRWLHAATERWGEPTAINIEHARDGLGSQKVARELMQANEKRRKANAAAVAAMAEKLKLSGKIHRSDQIRYFALQRQNCQCLYCGAPITYTTAEMDHIVPRADGSSTNDRSNLAAVCHACNQMKNAIPFATWAASNSANVGVSLEGALDRVDMWQQDNGMSKKQFQQLRKEVKARLKSKKPDEEFDGRSMESVAWMAVELRTRIEGFYRAHDEESVPSVGVYRGQLTAEARKASGFESRVNLIGGRGKTRFDRRHHAMDALVIALMNPSVSRTLALRVNMRDAQRLAGLEETWKNFYGKPGEASQRFESWRESMLRGVELFNIALSDNAIPFAENIRLRVGSSVIHDATVHSFCPPKRPDGEQIITKGYGEQHRLGSALPVELIDRAETPALWTALTRCPDFDPKKGLPENPSRSISVNGTRVGPSDLLNFFEFSNEGIKACLKVRGGYVELGSSIHHARIYRIDGKRTAYAMVRVFQVDLMRMKHQDVFTAPLKPSAISMRTAEPKIRKALADGTATQIGWLVRGDELVVETEAYSEGKIAQVMEQYPELKHWRVAGFPEAKKIKMRPYLLSKEGLDDNEQGPIRTVLDVKGWITTIHKLFGAGGVRVIRRNCLGEERFRSSASLPVTMPLE

SEQ ID NO: 8678 - protein, 1138 aa, synthetic construct
  REGION 1..1138: note = Synthetic
MIDSSENVPGIRYRVGIDVGLKSIGFCAVEVDRNDQPVRMLNSMVFIHDAGVDPNENKAAKSRKLTAGVARRTRRLYRTRHQRLVNLDRVLSKEFGWPLPDLTSFKDPREPWHVRARLLDGYIPDEGKRKEALSIALRHIARHRGWRNPYAKVETLLQPSEPSDFLKGLNERISTALRTTFSAEATPGQLIDAYLAHPDYVGRAGTPKLRGPQGILAGKLHQSDNAQEIRRICDVQRIEPAERDRLIRVVFEAKSPKGSAKERGLVGYDELPGQGRHVRAEKAHPAFQLFRMVSVLANLRIREGREERPLTPDELQGLVDFINEVSLKQEITWQDLADNLGIERSDLRGTAKASFDGSPVLRNPPTDVTTEKIMACKVKWLKEWWKEADDEQRGYMVDAFSNSGGSEDGTDVNDEVAELLEQATEDDQLEFEKISLPQGRAAYSLDSLRRLTDRMLRDGVDLHTARRLEFNVGDDWKPAVEPIGAPTGNPAVDRVLKQVSRWLHAATERWGEPTVINIEHARDGLGSERVARELMRENEKRRKANASAVAEMAAKLKLSGKVHRSDQIRYFALQRQNCQCLYCGAPITYTTAEMDHIVPRADGSSTNDRSNLAAVCRTCNHMKGKIPFAVWASSDKANQGVSLTGALERVNMWQRDNGMSPRQLKQLQREVCARLKSKKPDQEFDGRSMESVAWMAVELRTRIEGFYRVRDEESVPSVGVYRGQLTAEARKASGFESRVNLIGGRGKTRFDRRHHAMDALVIALMNPSVSRTLALRLNMRDAQRLTGVEETWKHFYGKPGEASKRFESWRESMLRGVELFNIALSDNAIPFVENIRLRVGSSVIHDATVRSFCPPKTPDGKQTITKGRGEQHALGSAMPVELIDRAETPALWTALTRCPDFDPKKGLPENPQRTISVNGTRVGPTELVNFFGSSAACLKVRGGYVELGSSIHHARIYRIDGKKNTYAMVRVFQVDLLRLKDRDLFTTPLKPSTISMRTAEPKIRKALADGTATQIGWLVEGDELVIDTSKYSNGFVGEVLARYPEATSWRVAGFMNGTQLRLKPLLLSKEGFVDEKQAERLSVEPTSEAIKKTADSPGWLPAANVLFGSGQVRVIRRNCLGEERYRSSASLPVSMMLE

SEQ ID NO: 8679 - protein, 1134 aa, synthetic construct
  REGION 1..1134: note = Synthetic
MLTSSENIPGIRYRVGIDVGLKSIGFCAVEVDHNDQPLKLLNSMVFIHDAGVDPNENKAAKSRKLTAGVARRTRRLYHTRRQRLANLDRVLSKDFGWPLPDQATFKYPTEPWHARARLVERYVADDEDRKAYLSIALRHISRHRGWRNPYAKVETLLQPAEPSEFLKGLNERISASLGRSFPADLTPGQLVDAYLAHPDYVKAPGTPKLRGPEGILEGKLHQSDNAEEIRRICDVQRIDAVDRDRLIRAVFQAKSPKGSAKERGLVGHDELPGQGKHVRAEKAHPAFQKFRIVSVLANLRIREGRAERPLTPEELQGLTDFLLIAGLKQEVTWQDLADNLGIERSDLRGTAKASFDGSPVLRTPPTDVTTEKIMACKVKWLKDWWKDADDEQRGYFVDAFSNSGGSEDSGDVNDEVAELLEQATEDDQLEFEKISLPQGRAAYSLDSLRRLTDRMLRDGVDLHTARRLEFNVGDDWKPAVEPIGTPTGNPAVDRVLKQVSRWLHAATERWGEPTVINIEHARDGLGSERVARELMRENDRRRSANAAAVAEMAAQLKLSGRVRRSDQIRYFALQRQNNECLYCGTEITFTTAEMDHIVPRADGSSTNDRANLAAVCRTCNHKKGAVPFAAWASSDRANTGVSLKGALDRVKFWVRDNGMSPKQFKQLQREVSARLKSRKPDEEFDGRSMESVAWMAVELRTRIEGFYRTRDEESVPSVCVYRGQLTAEARKSSGFESRVNLIGGRGKTRFDRRHHAMDALVIALMNPSVSCTLALRVNMRDAQRLAGREETWKNFYGKPGEASRRFESWRQSMLLASELFNSALSANAIPFLENKRLRANSSAMHEATQFSFSHAKPIKKGSKILKEKGEQRMLGAAMSVDLIDRAETPALWTALTRCPDFDPKNGLPANPERTITVNGTHVGPTELLNFFGSTSACLKVRGGYVKLANSIHHARIYRIGGKKTTYAMVRVFQVDLLHLKDRKLLKDGNLFEAPLKPSSISIRTADKKIRRALAEGTAKQIGWLVEGDELQIDTSKYTGGLIEDVLTQYPEAVSWRVAGFADKSKLRLRPYLLSAEGLDEDAPQGMKELLEGRGWRPAVNVLFSPRSVVVVRRNCLGEQRKRLDSGLPITEVLR

SEQ ID NO: 8680 - protein, 1141 aa, synthetic construct
  REGION 1..1141: note = Synthetic
MYVRCDTMCPMTTSSENVPGIRYRVGIDVGLNSIGFCAVRVDLHDRPLELLNSMVFVHDSGVDPNQKDKHDTRKYVGGDARRTRRLYKVRRQRLFNLDKLLSRELGWPLPEMASFDDPHEPWHVRARLLDGYIPEEGKRKEWLSIAMRHMARHRGWRNPYAKVETLLQPAEPSDFLKGLNDRISKSLGKIFPADATPGQLVDAYLAHPDYVNRAGTPKVRGPEGILAGKLHQSDNAGEIRRICEMQRIDPSVCDRLIRAVFEAKFPKGARRLVGHDELPGQSRHVRAEKAHPAFQKFRIVSVLANLRIREGRTERPLTPEELQRLTDFLLIAGLKQEVTWQDLADKLGIERSDLRGTAKASFDGAPVLRNPPTDVTAEKILACKVKWLREWWKDADAEQRGYLVDALSHSGGSEDEADTNDEIAELLEQATAEERVACEEVSLPQGRAAYSLDSLRRLTDRMLRDGVDLHTARRLEFNVGDDWKPAVEPIGAPTGNPAVDRVLKQVSRWLHAATERWGEPTVINIEHTREGLGSEKVARELIQANKRQRKSNIKAAEEIAARLKLSGRVRRSDRIRYFALQRQNCQCLYCGTDITFMTAEMDHIVPRADGSSTNDRSNLAAVCRTCNHMKGANPFAVWASSDRANAGVSLKGALERVKFWVRDNGMSSKQFKQLQREVSARLKSRKPDEEFDGRSMESVAWMAVELRTRIEGFYRTRDEESVPSVGVYRGQLTAEARKASGFESRVNLIGGRGKTRFDRRHHAMDALVIALMNPSVSCTLALRVNMRDAQRLAGREETWKNFYGKPGEASRRFESWRQSMLLASELFNSALSANAIPFLENKRLRANSSAMHEATQFSFSHAKPIKKGSKILKEKGEQRMLGAAMSVDLIDRAETPALWTALTRCPDFDPKNGLPANPERTITVNGTHVGPTELLNFFGSTSACLKVRGGYVKLANSIHHARIYRIGGKKTTYAMVRVFQVDLLHLKDRKLLKDGNLFEAPLKPSSISIRTADKKIRRALAEGTAKQIGWLVEGDELQIDTSKYTGGLIEDVLTQYPEAVSWRVAGFADKSKLRLRPYLLSAEGLDEDAPQGMKELLEGRGWRPAVNVLFSPRSVVVVRRNCLGEQRKRLDSGLPITEVLR

SEQ ID NO: 8681 - protein, 1156 aa, synthetic construct
  REGION 1..1156: note = Synthetic
MTKINDDLRYRVGIDVGLKSIGFCAVEVDENDQPLRLLNSMVFVHDAGVDPNENKAAKSRKLTAGVARRTRRLLRERKRRLARLDVLLSEKLNWPIPNLEDFEDPYEPWHTRAELVEHFIEDESERLEALSIAVRHIARHRGWRNPYSNVESLLVEVSPSKFLWSDDPDLQETTLNGRVAKAVGRSFAPETTPGQLISAYLSDPRYAPQMGRSFSFSGLRQRRGADEDYMKKAYADRVFLGKLMQHDYAAEIRQICKTQRIDEDTQKLLICAVFDAKSPKGSSKPLVGKDELPGQEEHYRAEKAHPSFQRFRIITVLTNLRIREGGSKRSLTTEELQRGMKFLFEDAVGANVSWTDLAEQFGVSRTDLLGTAAPSYDGSPALPAPPTDTTSEVIMNSKIKWLKDWWKNADLEQRGYMVDALSNSGGSSDEDFIRDEIAEVFQEASDSDWAKLDKLNLPPGRAAYSVDSMEQITELILQEGVDLYTALRRLFDVGKNWAPTPEKIEAPVGNPAVNRVFKQVARWLKMVTERWGTPVVINIEHTREGLKSARVAEEISAKDKKHWKAHQQATERMLADLGVSGKLRRSARLRYFAVQRQNCQCLYCGCPISYETAEMDHIVPRANSASTNLLSNLAAVCRRCNVQKGSVPFALWASSSSSPEEVTLKGTLDRVNAWKGSPELTGAEFKQFKKDLIKRLKSKVPEEEFDGRSMESVAWMAVELRSRILSFYQTQGSVDAPYVGIYRGQLTAEARRASGFENRVNLIGGRGKTRFDRRHHAMDALVIALMNASIARSLAWRVNLRDSQRITGTQETWKEFYEPSQSRSRERFIQWQTAMLRAVELFNIALTANAVPFHENIRLRVDSSKVHEEKIFSFNSQKKKVTGETKDGKLKIKATGIQVTLGSALSADLIDKAETPALWTALTRLPDFDSKDGLPEDKSRVIYVHGRKITASEQLNFFGSPSACLKVRDGYVEIGNSIHHARIYRIEGEKDTTYAMVRVFATDLVKMAHEDVFTAPLKPSTISMRTADPKIRTALADGTATQIGWLVEGDELQLETDKYSGGFIGEVLAEYPQLTSWRVAGFPDTAKLRLRPYLLSAEGIPADASDGLREIIERQGWRPAVNVLLTSGTVKVIRRNCLGEPRLNSGNSLPVTQWLR

SEQ ID NO: 8682 - protein, 1145 aa, synthetic construct
  REGION 1..1145: note = Synthetic
MYVRCDTMCPMTTSSENVPGIRYRVGIDVGLNSIGFCAVRVDLHDRPLELLNSMVFVHDSGVDPNQKDKHDTRKYVGGNARRTRRLYKVRRQRLFNLDKLLSRELGWPLPEMASFDDPHEPWHVRARLLDGYIPEEGKRKEWLSIAMRHMARHRGWRNPYAKVETLLQPAEPSDFLKGLNERISTSLGRSFRADATPGQLVDAYLAHPDYVNRAGTPKVRGPEGILAGKLHQSDNAGEIRRICETQRVDPSVCDRLIRAVFEAKFPKGARRLVGHDELPGQSGHIRAEKAHPAFQKFRIVSVLANLRIREGRAERPLTPEELQELTDFLLIAGLKQEVTWQDLADKLEIERSDLRGTAKASFDGTPVLRNPPTDVTTEKILACKVKWLREWWKGADDEQRGFLVDALSHSGGSEDEADVNDEIAELLEQATAEESVACEEVSLPQGRAAYSLDSLRRLTDRMLRDGVDLHTARRLEFNVGDDWKPAVEPIGAPTGNPAVDRVLKQVSRWLHAATERWGEPMVINIEHTREGLGSEKVARELIQANERQRKSNIKAAAEIAERLKLSGRVRRSDRIRYFALQRQNSQCLYCGTEITFTTAEMDHIVPRADGSSTNDRSNLAAVCRTCNHMKGAMPFAVWASSDQVNVGVSLNGALDRVKMWQRDNGMSHKQFKQLQREVSARLKSRKPDEEFDGRSMESVAWMAVELRTRIEGFYRTRDEESVPSVGVYRGQLTAEARKASGFESRVNLIGGRGKTRFDRRHHAMDALVIALMNPSVSRTLALRVNMREAQRIAGLEETWKNFYGKPGEASQRFESWRESMLLASELFNSALSANTIPFLENKRLRVNSSAVHEATQFSFSHAKPIKKGSTTLKEKGEQRTLGASMSVDLIDRAETPALWTALTRCPDFDPKNGLPENPKRTIRVNGTHVGPTELLNFFGSTSACLKVRGGYVKLANSIHHARIYRIDGKKTAYAIVRVFQVDLMRMKDQDVFTTPLKPSTISMRTADKKIRQALVEGTATQIGWLVEGDELQIDPSKFSGGFVGELLTQYPETKNWRVAGFMNGTQLRLKPLVFSKEGFVDEKQAARLGVEPTSEAIQKTVDRPGWLPAANVLFGSGGVLVVRRNCLGEVRWQSLGSLPVTMMLE

SEQ ID NO: 8683 - protein, 1167 aa, synthetic construct
  REGION 1..1167: note = Synthetic
MLHRVLLREGPGNFLMRTQMCVRCDTMCPMTTSSENIPGIRYRVGIDVGLKSIGFCAVEVDRNDQPVELLNSMVFIHDAGVDPNENKAAKSRKLTAGVARRTRRLYHTRRQRLANLDRVLSKEFGWPLPDQSAFKYPTEPWHVRAHLVEGFVADEDERKASLSIALRHISRHRGWRNPYAKVETLLQPTEPSDFLKGLNERISASLGRSFPADATPGQLVDAYLAHPDYVKKAGTPKLRGPEGILAGKLHQSDNAEEIRRICEMQQIDAADRDRLVRAVFQAKSPKGSAKERGLVGHDELPGQGKHVRAEKAHPAFQKFRIVSVLANLRIREGHSERPLTPKELQGLTDFLLVAGLKQKVTWQDLADNLGIERSDLRGTAKASFDGSPVLRTPPTDVTTEKILACKVKWLKEWWKAADDEQRGYFVDAFSNSGGSEDDSDVDDEVAELLEQATEDDQLEFEKISLPQGRAAYSLDSLRRLTDRMLRDGVDLHTARRLEFNVADDWKPAVEPIGAPTGNPAVDRVLKQVSRWLHAATERWGEPTFINIEHARDGLGSEKVARELMQANDKRRKANAAAVAVMAEKLKLSGKVRRSDQIRYFALQRQNCQCLYCGTEITFATAEMDHIVPRADGSSTNDRSNLAAVCHTCNQMKNAIPFATWAASDQANVGVSLEGALERVDMWQRDNGMSKKQFKQLQREVSARLKSRKPDEEFDGRSMESVAWMAVELRTRIEGFYRTRDEEAVPSVAVYRGQLTAEARKASGFESRVNLIGGRGKTRFDRRHHAMDALVIALMNPSVSRTLALRVNMRDAQRLAGLEETWKNFYGKPGEASQRFESWRESMLRGVELFNIELSNNAVPFVENIRLRMNSSAVHEDTLFSFSHAKPVKKGSTTMKEKGMQRALGAAIPIDLIDRAETPALWTALTRCSDFDPVKGLPENPNRTIVVTGRHVGPEELLNFFGSPSACLKVRGGYVKLANSIHHARIYRIDGKKTTYAMVRVFQVDLLRLKDQDLFTTPLKPSTISMRTAEPKIRQALADGTATQIGWLVEGDELQLNPAMYGDGSIAKVFSRYPELTSWRVAGFKSASKMRIKPLLLSKEGFVDDKTAAKFGIEPTADEVRKAVDDPGWITAINVLLQAGGVRVIRRNCLGEERWHSSAMLPVSMRLE

SEQ ID NO: 8684 - protein, 1014 aa, synthetic construct
  REGION 1..1014: note = Synthetic
LAGSCPVAGGDRDKRNSALSIAARHIARHRGWRNPYADVRTLLQPAEPSDFLKGLNERISTALRTSYPADATPGQLVNAYLSHPDYAGRAGTPKIRGPKGILAGKLHQSDNAAEIRRICDVQKVSADERDQLIRAVFDAKSPKGSAKERGLVGNDELPGQSKHVRAEKAHPVFQRFRIVSVLANLRIREGRAERRLSADELAGLTDFLMIAGLKQAVTWQDLADNLGIERADLRGTAKASFDNSPVLRNPPTDVTTEKILACKVKWLKEWWKEADEEQRGYMVDAFSNSGGSEDLTDVNDEVAELLEQASEEDQSEFEKIALPQGRAAYSLDSLRRLTDRMLADGVDLHEARRIEFGVGDDWKPAVEPIEAPTGNPAVDRVLKQVSRWLHAATDRWGEPTVINIEHARDGLGSERVARELMQANERRRKANAAAVASMAEKLNISGKIHRSDQIRYFALTRQNCQCLYCGTAITYSTAEMDHIVPRADGSSTNDRSNLAAVCRTCNHKKGAIPFAVWAASKQANEGVSLEGALERVDMWLQDNGMSKKQFKQLQREVKARLRSKKPDEEFDGRSMESVAWMAVELRTRIEGFYRARKDDAVPSTAVYRGRLTAEARKASGFESRVNLIGGRGKTRFDRRHHAMDALVIALMNPSVCRTLALRVNMRDAQRLTGAKETWKTFYGKPGEASQRFETWRESMLRGVELFNMALSDNAIPFVENKRLRMNSSAMHEDTLFSFAHARPVKKGSKTLKEKGEQRTLGSELPVELIDRAETPALWTALTRCPDFDPKKGLPDNPQRTISVNGSRVGPADLLNFFGSSAACLKVRGGYVKLANSIHHARIYRIDGKKRTYAMVRVFQVDLLRMKHQDLFTTPLKPSTISIRTAEPKIRQALADGSATQIGWLVEGDELRIETDKYTGGLIGDVLKRYPEATSWRVAGFPDRAKLRLRPYLLSAEGLEKDAPKEMKDLLDGKGWRPSINVVLSSGVVTVVRRNCLGEERYGSATSLPGTIVLE

SEQ ID NO: 8685 - protein, 810 aa, synthetic construct
  REGION 1..810: note = Synthetic
LTSSIKFSLKQEVTWQDLADYLGIERSDLRGTAKAAFDGSPVLRNPPTDVTTEKIMACKVKWLKEWWKEADDEQRGYFVDAFSNSGGSEDGTDVNDEVTELLEQATEEDQLEFEKISLPQGRAAYSLDSLRRLTDRMLRDGVDLHTARRLEFNVSDDWKPAVEPIGAPTGNPAVDRVLKQVSRWLHAATERWGEPTVINIEHARDGLGSEKVARELMRDNEKRRKANAAAVADMAQQLGLSGKVHRSDQIRYFALQRQNCQCLYCGAPITYATAEMDHIVPRADGSSTNDRSNLAAVCRTCNHMKGKIPFAVWASSDKANQGVSLTGALERVNMWQRDNGVSPKQLKQLQREVCARLKSKKPDQEFDGRSMESVAWMAVELRTRIEGFYRSRNEEFVPSVGVYRGQLTAEARKASGFENRVNLIGGRGKTRFDRRHHAMDALVIALMNPSVSRTLALRLNMRDAQRLTGVEETWKNFYGKPGEASQRFESWRESMLSGVELFNIALSDNAIPFVENIRLRVGSSVIHDATVRSFCPPKTPDGKQIITKGYGEQHSLGSAMPVELIDRAETPALWTALTRCSDFDPKKGLPENPQRTISVNGTRVGPTELVNFFGSSAACLKVRGGYVELGSSIHHARIYRIDGKKTTYAMVRVFQVDLLRLKDRDLFTTPLKPSTISMRTAEPKIRKALADGTATQIGWLVEGDELRLESDKYTGGFVGAVLASYPQVTSWRVAGFPDPAKLRLRPYLLAGEGLDGEASKAMKDLLEGQGWRPSVNVVFSPGSAVLVRRNCLGQERRNSGGALPNSSELR

SEQ ID NO: 8686 - protein, 1103 aa, synthetic construct
  REGION 1..1103: note = Synthetic
MSEINGDLRYRVGIDVGLKSIGFCAVEVDEKDHPIRLLNSMVFIHDAGVDPNENKAAKSRKLTAGVARRTQRRVRQNRRRLAELDRALSEELNWPLPNLEDFEDPYEPWHTRAELVDHYIEDESERLEALSIAVRHMARHRGWRNPYIKVDSLLTPMEPSEFLRGLNERVGEALGREFPVDATPGQLISAYMSDPKYRESNGIRGDDGILQGKLHQYDNAAEIRKICEVQRLGTDVEKLLVRKVFFAKSPRGSAAGLVGHDELPGQEKHIRAEKAHPDFQLFRIVSVLTNLRIREAGAERCLTPDELSGLTDFLVIAGLKQRVTWADLADNLGIERADLRGTARPSVDGEPALRFPPTDVTTEKIMASKVKWLKEWWKSADSERRGYMVDALSNSGGSTDDNDLDDEIAELLERATEDEQTELEKIQLPQGRAAYSLDSLRKLTERMLSEGVDLHTARKQLFNVDDDWRPEPEAIEAPVGNPAVDRVLKQVARWLSMATDRWGAPDVINIEHTRDGLGSEKVARELLRESQKRQDLNQKNMDQMIQELGISGKARRSSLLKHQAIQRQNSMCLYCGTQIGFETAEMDHIVPRANSGSSNERSNLAAVCRACNHQKGAIPFAAWATSGQARAGVSLDGAIERVRAWERDPGMSPKQYAHFRSEVISRLKSRKPDEEFDGRSMESVAWMAIELRTRIDGFYRKLKAESTPSIGIYRGQLTAEARKASGFENRVNLIGGKGKTRFDRRHHAMDALAIALMNQSVSQTLGLRVNMRESQRITGQEETWKNFYGKPGHASERFEQWRESMLRAVELFNIELAKNTVPFVENVRLRVGSSKVHDDTVRKFTHAKLGAALSADVIDRAETPALWTALTRLPDFDPKNGLPEDPKREIRVHGHKITADEDLNFFASPSACLKVRGGYVEIGGSIHHARIYRVEGKKTTYAMVRVFSTDLVRMTHEDVFTAELKPSTISMRTAYPKIRKALADGTATQIGWLVEGDELQIETDKYLSGPVAEALTKYPQLRQWRVAGFPDPTRLRLRPLLLSSEGLPEDESQGLREILEGKGWWPAINMLLATGEVLVVRRNCLGEQRFSSQNSLPTSQLLR

SEQ ID NO: 8687 - protein, 1155 aa, synthetic construct
  REGION 1..1155: note = Synthetic
MTEINDDLRYRVGIDVGLKSIGFCAVEVDNKDQPLRLLNSMVFIHDAGVDPNENKAAKSRKLTAGVARRTQRRTAQNRRRLAELDRVLSEELHWPLPNLEDFEDPYEPWHTRAELVDHYIEDESGRVEALSLAIRHIARHRGWRNPYSKVKSLLAEVPPSNLLWSEDPELQETTLNGRVAKALGRSFAPETTPGQLISAYLSDPRYAPQMGRSFSFSGLRQRRGADEAYMKKAYADRVFLGKLMQHDYAAEIRQICKTQRIDEDTQKLLICAVFDAKSPKGSSKPLVGKDELPGQEEHYRAEKAHPSFQRFRIITVLTNLRIQEGISKRTLTIEELQKGVKFLFEDSVGADVSWTDLAEKLGVTRTDLLGTASPSYDGSPALRFPPTDVTTEKIMASKVKWLKEWWQRADFEQRGFMVDALSNSGGSSNDGAIKDEIAEVLQQATAEDWTEIDKIQLPTGRAAYSVDSLNKLANVMLSEGVDLYSARCRLFNVESDWEPTPEEIGAPVGNPAVNRVLKQVAKWLRMATERWGTPVAINIEHTRDGLKSARVAAEIATKGQKHRDAHQQAVDEIVTELGITGKLRRSAMLRYFAVRRQNNQCLYCGCPISYETAEMDHIIPRANLASTNSRSNLAAVCHRCNLQKGRIPFAQWAESVSSPAEVSLKATLARVAQWKATPEFTAAEFKSFKKDLVKRLKSKQPEEEFDGRSMESVAWMAIELRSRIQGYYRVRGSGFTPHIGIYRGQLTAEARRASGFENRVNLIGGRGKTRFDRRHHAMDALVIALMNDSVARSLAWRVNRRESQLVTGEHETWKDLFDPSQNGSRERFERWCESMLVAVELFNIALAEDAVVFHENVRLRVNSSKVHKDKVVSFNQHKSKIVGVRKDGTPKIKETGVQLPLGSVLSVDLIDRAETPALWTALTRLSDFDPITGLPEDANREIWVHGRQILGDDLINFFGSSAAYLKVRGGYVGIGDSIHHARIYRINGKKTTYAMVRVFSTDLVRMTHEDVFTATLKPSTISMRTADPNIRKAIANGTATQIGWLVEGDELQIETDKYASGSIGEVLAQYPQLRSWRVAGFYGVTQLRLRPYILAAEGIPSEASESLRRVVEGKGWRPSINVLLSSGCVKVVRRNCLGEPRFNVKSSLPVSQILR

SEQ ID NO: 8688 - protein, 1026 aa, synthetic construct
  REGION 1..1026: note = Synthetic
MESLVNREVGGLGKPRYLVMGMDPGIKSCGFALLDLNNQEILEMGSRLFDAPTHPKTKQSMAVIRRGYRSTRRNIDRTQDRLKHCLKTLKRFDVVPEDADKEFFHTVKGDKQPILLRTDGLNRLLTSREWALVLYSLCKRRGYIPHGEGSDSGTSEDGKVLAALKANERAFADAGYRTVGEWLASLPQSRNRGGNYDKCVTHAQLTDEVRTLFEAQRGFGSPVASQELEDAYIEVFDWERSREEFDKRTYGLVGTCSYFPNEKRAARCTLTSEMVAAYGALGNITIVKRDGSTHPLSAVERDQCIDILFAVDPMKGNKTCAVKYGFLRKRLDLESGDYFKGVPLDDEKNREVFKPKGWRSLRSVLHETNRELLVKLHDDRDLADAVMEAVAYSSSVDVLKSQLSSLDLSNGEIESICAMPYSSKVLNGYGNRSKKALDILLGCFEDPDVLSLTDAEDASGLGAVRMQGAAIDKGERLIPYETWIALTGRTNNNPVVIRALSQMRKVVNAVCRKWGVPDEIHVELDRELRLPKKAKDEIAKAKKRNEKDRQRVAAQIAELLGCSADDVKGDYIEKYRLWEEQECFDIYSGEKIEVDRLIREETYTQIDHVLPFSRTGDNSRHNKVLVLARSNQLKREQTPYEWMTSNTEGAPSWDAFKRRVEENKKLSRRKKNFLLEKDLVSKEGEFQSRNMTDTAYMSREVCAYLSDCLQFPDDGLKNHIVPIAGRATAWLRRQWGLNFGATGEKDRSDDRHHATDACVIAACSRSLVIKTAKVMKQTHWQVTRDMTREQRRSARMKALEGTMPWSTFANEVRERWKVTVPTRFVPRKGRGELYGQTVYSYLGVDESGKDLGRKKGSNKKIVMGNAVISKDGKSMVKISEMLCLRLWFDPDAKGRGGKKGRWYSDPVYKADLGVIQSNAYIPRVAKAHRGRKAWSPVPQAALRRSPVVIYLGDVVKVGDVVGRFAGFDIDSANWSFVDCLDGKGIAFPTVGSLTSELRPEVIREKVLGNAEVYRSTQDDGTSSGAD

SEQ ID NO: 8689 - protein, 1023 aa, synthetic construct
  REGION 1..1023: note = Synthetic
MSYGGTVARVSTLSDWIAMQPESVRLFGKLGVRRYLVLGLDPGVASCGFSLIDLHNHEILEMGSRLFDSPVVPKTQQSKAAVRRGFRSTRRNLDRTQNRLKHCLRLLKEQGLVPAGATPEFFHTAKGDQPPIRLRVAGLDRLLTDREWAIVLYSLCKRRGYIPHGEGGEGDVDSASEDGKVLKAISQNKKLLAESGARTVGEWLATQPRSRNRSGEYDKCVTHAQLTDEVRALFSAQRSFGSTSATEDLEDAYLEVFDWEKPRDAFDRRSYELVGNCVYFPGEKRAARCTLTSELVSAYGALGNVTIQFPDGTTRPLTAKERDTFIDTLFSPSALKGNKECKVKFSDIRRRLDLDARTSFKGISSDDEKNREVYRPQGWRTLRKTLGSEGTALLTRFLADRDLADATMEAVAYSSSLPVLSSRLEELELTDDEVALVERLPYSSRALNGYGSRSKKALDLLLGAFEEPEVLTLTDAETATGLDELRKHGSAGIERSTKLMPYAAWIALTGRTNNNPVVLRAMAQMRKVVNAVCGEWGVPNEIHVELARELALPKKAKDSIARANRQNEKDNERIRKQISELTGRDHDRIKNSLVAKWRLWEEQGNCDIYTGERIDALRLVNDDTYTQVDHILPFSRTGDNSRHNKVLVLAHSNQLKRERSPFEWMTSEEAGAPDWNSFVASVQENRRISPRKRGFLLERDLMSKEGDFQSRNLTDTAYMAREVCAYLSDCLAFPNDGRKVHVVPTKGTASAWLRRSWGLNFGMAGEKDRSDDRHHATDACVIAACSRSLVIQTAKLSEHHYTLNEQGRDEALLGSMPWPSFADDVRQMREKVIPTRFVPRVGSGELFEQTIYSYVGTDDKGKDLLSAKGGKPKPAGNAVVSDDEKSAIKVGGMICLRLWHDVDARKGRGQWYADPIYYADLPALRNGTYVPRIAQAHKGRKTWKPIPERVLSGKPICLYLGDAVRVDHEIGRFSGFDIDAANWSLKSIYSGEKICFPSIGKIDNITFPIKITEDILGRCWGNL

SEQ ID NO: 8690 - protein, 1018 aa, synthetic construct
  REGION 1..1018: note = Synthetic
MVLFSRVLIREGCSMEITINREIGKLGLPRHLVLGMDPGIASCGFALIDTANHEILDLGVRLFDSPTHPKTGQSLAVIRRGFRSTRRNIDRTQARLKHCLQVLKAYGLIPQDATKEYFHTTKGDKQPLKLRVDGLGRLLNDREWALVLYSLCKRRGYIPHGEGNQDKSSEGGKVLSALAANKETIAETSCRTVGEWLAQQPQSRNRGGNYDKCVTHAQLIEETHILFDAQRSFGSKYASPEFEAAYIEVCDWERSRKDFDRRTYDLVGHCSYFPTEKRAARCTLTSELVSAYGALGNITIIHENGTSRALSATERDECIAILFSCEPIRGNKDCAVKFGALRKALDLSSGDYFKGVPAADEKTREVYKPKGWRALRNTLNAANPILLQRLRDDHDLADAVMEAVAYSSALPVLQEQLQGLPLSEAEIEALCRLPYSSKALNGYGNRSKKALDMLLDCLEEPEVLNLTQAENDCGLLGLRIAGSQLERSDRLMPYETWIEHTGRTNNNPVVIRSMSQMRKVVNAICRKWGVPNEIHVELDRELRLPQRAKDEIAKANKKNEKNRERIAGQIAELRGCTADEVTGKQIEKYRLWEEQECFDLYTGAKIEVDRLISDDTYTQIDHILPFSRTGENSRNNKVLVLAKSNQDKREQTPYEWMSHDGAPSWGAFERRVQENQKLSRRKKNFLLEKDLDTKEGEFLARSFTDTAYMSREVCAYLADCLLFPDDGAKAHVVPTTGRATAWLRRRWGLNFGSNGEKDRSDDRHHATDACVIAACSRSLVIKTARINQETHWSITRGMNETQRRDAIMKALESVMPWETFANEVRAAHDFVVPTRFVPRKGKGELFEQTVYRYAGVNAQGKDIARKASSDKDIVMGNAVVSADEKSVIKVSEMLCLRLWHDPEAKKGQGAWYADPVYKADIPALKDGTYVPRIAKQNYGRKVWKAIPDSLLIQKPLEIYLGDLIRVGDKLGRYNGYNIAKANWSFVDALTKKEIAFPSVGMLSNELRPIVIRKSILDN

SEQ ID NO: 8691 - protein, 1006 aa, synthetic construct
  REGION 1..1006: note = Synthetic
MVEVKTEAVGRLGRPRYLVLGMDPGIASCGFALLDINNHEILEMGVRLFDAPLHPKTKQSLAAIRRGFRSTRRNIDRTQDRLKHCFECFKKYGVVPDDADKEYLHTVKGDKQPLKLRVDGLNRMLTNREWAMALYSLCKRRGYIPHGEGAQDKSSDDGKVLAAISANEKEIAAGKFRTAGEWLASRPTSRNRGGNYEMCVKHEQLIEETRILFEAQRSFGSKVASEDFEREYIDICNWERPRDDFDRRTYGLVGSCVYFPQEKRAARCTLTSELVSAYGALGNITIVLGDGGVRRLTAAERDECIRILFTADPNAKTRVVKFGALRKKLDLSSRDYFKGVPADDEKTREVFKPSGWRALYSTLRESNPQLLARLRDDIDLADAVMEAAAYASSASSLENCLSQLPLSDDEKQALCALPYSSKVLNGYGSRSKKALDLLLACLKEPEVLNLTDAEAACGLDALRLGGPQLERSEKLIPYEAWVSAAGRTNNNPVVIRAMSQMRKVVNAICGKWGVPNEIHVELDRELRLPKRAKEEIAKANKKNEKERERIAVQAADILSCSPDEVSGKQIEKYRLWEEQENSDLYTGERIHVQRLLSDDTYTQIDHILPFSRTGENSRNNKVLVLSESNQQKREQTPYEWMNSGQPGAPSWDEFKLRVQANQHLKHRKKEFLLEQDLESKEVEFLQRNVTDTAYMSREVCAYLSDCLLFPDDGMKVHVVPTTGRATAWLRRRWGLNFGATGEKDRSDDRHHATDACVIAACSRGLVIKTAKVMKGTHWSITRNMTSEERRDARMEALRESMPWESFADDVRARRDFVVPTRYVPRKGSGELFEQTVYSYVGRNEKGQDLGRKKGVDKDKVMGNAVVSDDGKSVIKVSEMLCLRLWHDPEIKKKGKVVGGWYADPVYKSDIPALKDGTYVPRIAKAHCGRSAWAPVPERLLLQRPVELYLGDVVRVKEMVGCLSGFDMGGVAWKFVDPMTRESISAPTIGSLTGKDAPKVVRGGIVG

SEQ ID NO: 8692 - protein, 561 aa, synthetic construct
  REGION 1..561: note = Synthetic
LLNDREWALVLYSLCKRRGYIPHGEGSQDKSSEGGKVLSALAANKEAIAETSCRTVGEWLAQQPQSRNRGGNYDKCVTHAQLIEETHILFDAQRSFGSKYASPEFEAAYIEVCDWERSRKDFDRRMYDLVGHCSYFPTEKRAARCTLTSELVSAYGALGNITIIHENGTSRALSATERDECIAILFSCEPIRGNKDCAVKFGALRKALDLSSGDYFKGAPAADEKTREVYKPKGWRVLRNTLNAANPILLQRLRDDRNLADAVMEAVAYSSALPVLQEQLQGLPLSEAEIEALCRLPYSSKALNGYGNRSKKALDMLLDCLEEPEVLNLTQAENDCGLLGLRIAGAQLERSDRLMPYETWIERTGRTNNNPVVIRAMSQMRKVVNAVCRKWGVPNEIHVELDRELRLPQRAKDEIAKANKKNEKNRERIAGQIAELRGCTADEVTGKQIEKYRLWEEQECFDLYTGAKIEVDRLISDDTYTQIDHILPFSRTGENSRNNKVLVLAKSNQDKREQTPYEWMSHDARLHGMLLSVAFRKTRNSAVAKRTSFWKKTLIPRKANS

SEQ ID NO: 8693 - protein, 1039 aa, synthetic construct
  REGION 1..1039: note = Synthetic
MVPFSRVLIREGCFMEITINREIGKLELPRHLVLGMDPGIASCGFALIDTANHEILDLGVRLFDSPTHPKTGQSLAVIRRGFRSTRRNIDRTQARLKHCLQVLKAYGLIPQDATKEYFHTTKGDKQPLKLRVDGLDRLLNDREWALILYSLCKRRGYIPHGEGNQDKSSEGGKVLSALAANKEAIAETSCRTVGEWLAQQPQSRNRGGNYDKCVTHAQLIEETHILFDAQRSFGSKYASPEFEAACIEVCDWERSRKDFDRRTYDLVGHCSYFPAEKRAARCTLTSELVSAYGALGNITIIHENGTSRALSATERDECIAILFSCEPIRGNKDCAVKFGALRKALDLSSGDYFKGVPAADEKTREVYKPKGWRVLRNTLNAANPILLQRLRDDRDLADAVMEAVAYSSALPVLQERLQGLPLSEAEIEALCRLPYSSEALNGYGNRSKKALDMLLDCLEEPEVLNLTQAENDCGLLGLRIAGAQLKRCNRLMPYETWIELTGRTNNNPVVIRSMSQMRKVVNAVCRKWGVPNEIHVELDRELRLPQRAKDEIAKANKKNEKNRERIARQIAELRGCTADEVTGKQIEKYRLWEEQECFDLYTGAKIEVDRLISDDTYTQIDHILPFSRTGENSRNNKVLVLAKSNQDKREQTPYEWMSHDGAPSWDAFERRVQENQKLSRRKKNFLLEKDLALRWFLWERFRHRPSSAGENNDLELKRPREGPFPRHPPMIAKPNSDNRRGVTHEESTTSRPRSGPHGRPGRAHRGRAHRRERPALQARAAPLPRMRQGLRLLRHGEPRGPQAVEGDGPGALGLLPGVRALQGALPGARRAHRGRPLGAARGALHARLRGLGGVAGGPLHRLGGLRARPRRVAQRGRRVQARLRRAGGRARRLEVRRRAPHRHRRDVVQEGPQVRHGGRRPRPRLPHLGARGHRQGRAQPVPRRAHARAEARHRGGDRRRREVDKAAGQAPLPQREVGHGPLPRGPVDERRARRRALRGVERRQGRQAQARGQARQACQRRAGLATPIWTIPGGTAPPP

SEQ ID NO: 8694 - protein, 1030 aa, synthetic construct
  REGION 1..1030: note = Synthetic
MPLVLPPTVLSARNGTFLIAFFRKGCTMTSTVNREIGKLGLPRHLVLGMDPGIASCGFALIDINNHEILEIGVRLFDSPTHPKTGQSLAVIRRGFRSTRRNIDRTQARLKHCLEVLEKYDVIPQDATKEFFHTTKGDKQPLKLRVEGLDRLLTNREWALVLYSLCKRRGYIPHGEGSQDKSSEGGKVLSALAANKEAFAETSCRTVGEWLAQQPQSRNRGGNYDKCVTHAQLIEETRVLFEAQRNFGSQYASAELEEAYVQVCDWERSRKDFDRRSYDLVGYCTYFPTEKRAARCTLTSELVAAYGALGNITIVHEDGTTRTLTAAERDKCIAILFSYEPIRGNKDCAVKFGALRRELDLNSGDYFKGVPAADEKTREVYKPKSWRALRNTLNTTSPFLLRRLYDDRDLADSVMEAVAYSSALPVLEEQLQALPLSPAEIDALCKLPYSSKALNGYGNRSKKALDMLLDCLEDSEVLGLTQAEDDCGLLGLRIQGSQLERSERLMPYEMWVELTGRTNNNPVVIRSMSQMRKVVNAICRKWGVPNEIHIELDRELRLPQRAKDDIAKAHKKNEKNRERIAGQIAELRGCNPEDVSGRLIEKYRLWEEQECFDLYTGAKIEVDRLISDETYTQIDHILPFSRTGENSPSNKVLVLAKSNQDKREQTPFEWMSKEGAPSWDAFKRRVEENQKLGRRKKNFLLEEDLEAKEGEFLTRSFTDTAYMSREVCAYLADCLLFPEDGTKSHVVPTTGRATAWLRRRWGLNFGTNGEKDRSDDRHHATDACVIAACSRSLVIKTAKISEQTHWTVTKNLDKDERDHLRMKALENVMPWETFANEVRASHDFVIPTRFVPRKGKGELFEQTTYRYAGVNDKGKDLARKANSDQNIVMGNAVVSDDGKSVIKVSEMLCLRLWHDPEAKKGQGCWYADPVYKADIPALKDGTYVPKIAKAHTGRKAWKPVPESAMKHAPLEIYLGDLVKIGDFIGRFSGYNIDNANWSFTDRLTRQKLSCPTVGKLNNALIPVIIRESSIR

SEQ ID NO: 8695 - protein, 809 aa, synthetic construct
  REGION 1..809: note = Synthetic
MVPFSRVLIREGCFMEITINREIGKLELPRHLVLGMDPGIASCGFALIDTANHEILDLGVRLFDSPTHPKTGQSLAVIRRGFRSTRRNIDRTQARLKHCLQVLKAYGLIPQDATKEYFHTTKGDKQPLKLRVDGLDRLLNDREWALILYSLCKRRGYIPHGEGNQDKSSEGGKVLSALAANKEAIAETSCRTVGEWLAQQPQSRNRGGNYDKCVTHAQLIEETHILFDAQRSFGSKYASPEFEAACIEVCDWERSRKDFDRRTYDLVGHCSYFPAEKRAARCTLTSELVSAYGALGNITIIHENGTSRALSATERDECIAILFSCEPIRGNKDCAVKFGALRKALDLSSGDYFKGVPAADEKTREVYKPKGWRVLRNTLNAANPILLQRLRDDRDLADAVMEAVAYSSALPVLQERLQGLPLSEAEIEALCRLPYSSEALNGYGNRSKKALDMLLDCLEEPEVLNLTQAENDCGLLGLRIAGAQLKRCNRLMPYETWIELTGRTNNNPVVIRSMSQMRKVVNAVCRKWGVPNEIHVELDRELRLPQRAKDEIAKANKKNEKNRERIARQIAELRGCTADEVTGKQIEKYRLWEEQECFDLYTGAKIEVDRLISDDTYTQIDHILPFSRTGENSRNNKVLVLAKSNQDKREQTPYEWMSHDGAPSWDAFERRVQENQKLSRRKKNFLLEKDLALRWFLWERFRHRPSSAGENNDLELKRPREGPFPRHPPMIAKPNSDNRRGVTHEESTTSRPRSGPHGRPGRAHRGRAHRRERPALQARAAPLPRMSSRSRRTLRTISGLNPNFSSFSL

SEQ ID NO: 8696 - protein, 696 aa, synthetic construct
  REGION 1..696: note = Synthetic
MVLFSRVLIREGCSMEITINREIGKLGLPRHLVLGMDPGIASCGFALIDTANHEILDLGVRLFDSPTHPKTGQSLAVIRRGFRSTRRNIDRTQARLKHCLQILKAYGLIPQDATKEYFHTTKGDKQPLKLRVDGLDRLLNDREWALVLYSLCKRRGYIPHGEGNQDKSSEGGKVLSALAANKEAIAETSCRTVGEWLAQQPQSRNRGGNYDKCVTHAQLIEETHILFDAQRSFGSKYASPEFETAYIEVCDWERSRKDFDRRTYDLVGHCSYFPTEKRAARCTLTSELVSAYGALGNITIIHENGTSRALSATERDECIAILFSCEPIRGNKDCAVKFGALRKALDLSSGDYFKGVPAADEKTREVYKPKGWRVLRNTLNAANPILLQRLRDDRNLADAVMEAVAYSSALPVLQEQLQGLPLSEAEIEALCRLPYSSKALNGYGNRSKKALDMLLDCLEEPEVLNLTQAENDCGLLGLRIAGAQLERSDRLMPYETWIERTGRTNNNPVVIRSMSQMRKVVNAVCRKWGVPNEIHVELDRELRLPQRAKDEIAKANKKNEKNRERIAGQIAELRGCTADEVTGKQIEKYRLWEEQECFDLYTGAKIEVDRLISDDTYTQIDHILPFSRTGENSRNNKVLVLAKSNQDKREQTPYEWMSHDGAPSWDAFERRVQENQKLSRRKKNFLLEKDLDTKEG

SEQ ID NO: 8697 - protein, 1073 aa, synthetic construct
  REGION 1..1073: note = Synthetic
VTIAAQVHYVHPSGPFRHWSRGMQKTKPRILGLDLGANSLGWALLEPDADTCRVVAAGVRVFEAGHDNFDTHKEASRNKDRRDQRQIRRQLKRRAQRKTTLFHLLQGGGLLPEGPASTAEERTKILMDLDRALLAQWADGDHRRAQVVPYRLRAAALDQPLPPHSLGRALYHLGQRRGFKSNRKSAPSADEKPGQVKEDVAALQKKLQDTGCRTLGEFFASCDPFERRIRQRWTGREMFVKEFDAIWSAQLPHHPAILTTALGNDVRHAMFFQRPLKSQRHLIGRCEFEPTRRRASRACLAFQRFRIVQTVNNLVFISEDTGEERRLDPDERQKLVQHLDTKTKITFKGIARLLRLGKVRFNLEDGGEKQIKGNSTTYKLRGLLGAHWDDLAATDRDRLVDEILAYESETGLRRRLRREWGFDHDTATNVAAVTLEPDYANLSRAAISTLLPHLENGLHYAEAVDKAYPDYRSAQTAVETLPPVTKMVGEVRNPTVLRSLSELRKVVNAIIRAHGKPTTIRLEMARDLKRPRQARMDIQKRARQNQKAREAAATSIIKEVGIDAPSRADIEKYLLAEECNWTCPYTGKRITMNTLFNTPQFDVEHIIPRERSLNNTFLNKTLCWHEENRHRKGSKTPLEAYGPVESSEFGAILGRVRQFQGSKGQTLAKFRFFTMTSEQVQEAFDGFCDRHLQDTAYASRLAADYLAGLYGGRIDAAGTQRIQTTSGQANAIFRNVWGLNAILGDGPGKSRDDHRHHAVDAIVTALATPNRIKGLSTRASRQHGRQGFHDVPLPHTNLLDEARRAIHGIVVSHRLTRRLNGALHEDTNYSNRQHHPTGKDGAVEEWRHLRKPIEGLSAGDIERIVDRRVRDCVQSKLEESGHSDPGKAFKDPARHPRLPTAAGDGVPIHKVRIRLQRNTKRIAGGVAARNVWLRSNHHLEILEVASADAGQQPTWIGRVVSRLEAMRRKQRGTSIIGGPTCPEETLLFTLRPSECVKMVHKGEEGVFVVKGISQERHGSARLSLQALNEARPASAVRKKGEKARVGKTPDTLRTAHASKVAISPLGAVLPSRD

SEQ ID NO: 8698 - protein, 1101 aa, synthetic construct
  REGION 1..1101: note = Synthetic
MVGSRTRQSYVLGLDIGVASIGWAVVDPSTARVIRAGVHLFEAGVDGGKQNPETAMASGREQSRATPRRDARQQRRQTWRRAYRKRVLLKALIRRGLLPAPERRLDSPQDIDSYLKAIDAGLRHAWEAKQNADHRLRQLLPYRLRAEALRTRLEAHEVGRALYHLAQRRGFLSNRKTDKDDAGDENKNTGKVKTGISELETLMKAAGADTLGQYFAALDPSDSAALRIRGRWTARSMYEHEFARIWEQQSKHHPSLMTAEARTEIHRAIFFQRPLKSQAHLIGRCSLVPAKRRAPIADRLAQRFRMLQKVNDLEIMPCVQIELEDFDRETGEVRMNPKTGKPRVKKQWVPDPAQTQRRLTPEEREAAIVRFSRGDATFNQLRQSGAAPRESRFNFEREGETGLPGLRTDAKLRAVFGERWDGFSEDDKNAAVEDCLSFERADAMEKRGREHWGLSAESARAFARVRLEEGHASLSRAAIRRLLPGLESGVRYATIREKVFPESSKPIVPVGQLPPLDDAFDAPVSPAVSRALSEMRGVVNAIIRRYGKPAHVRIELARDLKKGRKRREAISKQMAARRKLREDAAYRLLKQYPDFGSRPEDVRPGDVLKVLLADECGWLCPYTGRSFGWEDVFGAHPTIDIEHVWPFKRSLDDSYLNKTLCCVRENREVKQHRMPSEAYSPDRLAEILQRVARFKGDAAREKLDRFRAEAIPPDFTNRHLSETRYISRKAAEYIALLYGGFSDEESTRRVHVPSGGLTGWLRREWAMDAILSDRNEKERSDHRHHAIDAIIIAHTTPTTIKRLQESAAKADEMGSRRRFAGVQAPFDLADTKRAVQAIIVSHRQNKKARGKFHKDTVYSKPLPSAGGKTRHRIRKELHKLNESEIGAIVDRRVREVVRAAFEERKRAGARTPAQAFGEPQHRPTLPHGERIRRVRLYTSAQPQLLGVARRDRKARGEAKQRRVDLQANHHTVIMAKLGKDGTEKAWVDEPVTLCEAMDRVRQRPARPLVSHEVPDGCRFKFSLAANDFIEMDTPDGQGRAIYRVLNVSKNDMEVVSHQDARTQKTRISEKQRERVRGSSLHSRHARKVHITYLGEVKNAGG

SEQ ID NO: 8699 - protein, 1080 aa, synthetic construct
  REGION 1..1080: note = Synthetic
VRSAATVGDGARAGLRYVLGLDLGVASVGWAVVRLGEDGAPAGIIRMGTHLFEAGIDAGKSTPEAALAAGKEASRATPRRLARQQRRQTWRRAARKRRLLRTLQRYGLLPEGDTRDGAAIDAYMKALDAGLRETWNEGADHRTHQILPYRLRAAALERRLEPYEVGRALYHLAQRRGFLSNRKTDRGDEDQEAGKVKQGIADLAAAMERAGAPTLGAYFASLDPTNPEERRIRERWTDRRMYVKEFEAIWGAQAEHHPELMTEEAREAVRCAIFFQRPLKSQRHLIGRCRLIPSRRRCAVADRAYQRLRLLQKVNDLRYVDTATGEERGLTPEQRAALIQLLEAGDVPFSALKRTRGGLGLPKSVEFNLERGGEKKIVGHRTDEKLRKVFGEERWGRLSEADRAELVEDVLTIENPDALERRGRERWGLPADAAVELARVRLEGGYAPFSRRAILRLLPHLERGVPLQTAIKEEFPASFEAAEAMDLLPPVIGTGPGGEGGAFRDPPSPAVTRGLSELRKVVNAIIRRWGKPERIHLEMARDLKKGRKQREEAAREMRAREKEREEAKRKLLEEAGIEHPSREDIEKVLLAEECGRTCPFTGRSFEMRDLVGPTPSVDVEHIWPFRRSLDNTFLNKTLCLHEENRHRKRDRTPFEAYGADPQRYGEILQRVARFKGGARREKLRRFAATEIDEGFTERHLAETRYVSRKAAEYLALLYGGLWDADGTRRVQVSTGGLTAWLRRNWGIDGLVGAADGEGGKARDDHRHHAVDALVVALSDARAVKRLSEAARAAAENGGGRLLAEVERPWEGFERDAREAVASVVVSHRADRRVSGALHKDTIFSRPIRGVGTSGEGGHRLRKALHKLSRDEVEAIADPRIRDLVRAALESRGGGDPAKVFADPAAAPVLEYGDGRRVRVRKVRVDRRERPRAFGQGGGRRYVAPQSNHHTVILARVGPDGRDVEWRDEPVPLWEAYERIRRGEPVVDTRDREDGWVFRFSLVVNEYIEMDRKDGGGRGVYRILNISGGDMEIREHFDGRTRQAIRAAGSSPERVSGSSLLRRNARKVRVTHLGEVVRAGG

SEQ ID NO: 8700 - protein, 1324 aa, synthetic construct
  REGION 1..1324: note = Synthetic
MLRPCVRKDRLTVLCRPPGRLPSRREFLRLDQPRRAEGQLGIVTSDPCPCAGGKHLICRKAAGNNGSMSAKDYVLRGAVPMDSTLMPNHIWAFDLGKGSEGEAVRHGTDFPHVESLLIPAELARRGPAATSGTPANKYRALKTREAHRARERWLETVWTAAGFTPLHGRQVAKVCSLPVKLDENGEPKFDKGHWAQVAKGDYRLEMEFAPKLGTKTKDGAPSDLAGADICYTSCLLRIKLLTWKESGPKVADWQIYKALRSALQTRGYGRVPWAAKESQREQQTKEEEAKETETATRWAEFKQSVAPEFRFPCYYDAAKMGLWNPAAPNEPTPQNSHLANSTRNVRFDRADVECEIKQLAENADRILEGRLSLAKEKLVQEFMEGRRKRVREINERRALKNLTLPPDKRKQPRKDPAFQRISASVADFFCYGPSGVSCASYDRSLQADLALRAGSAYDWQGALGQKVPRFDNRILNDCVLIPRFHVCKVDVRVAEKDDDKQGVKAGQVFADSLLATEVTFLLKLKNVLVADLEKGQRKLKAHEVRAIFEYAHRQLQSLKLLSQDGGLVKNWPGKVADCFALTKSEWGNKKKGIGLLGLRPLAGHEEVKAPKTGGRSAYSRAALRILKELILSGEAPSVFHARLLKREPELLGRLGSSLAKPLALHADSTAQDAEQSKREDTEHRKCGLLVSELKFLLQMRKEDGQPDSWENLFAPSQTLDALKGRHTTDGKLDSEAAIRELLGTINDPIVRHRLGVFAGRLKKLQFGDAKENIQAFGVPDAIVLEFVREDFMGEKALAELQDFQRRREADRKEAKEMAAAAGATSSLSALKYQLWKAQGGECLYGKEVFNESGVSKAQCLYRGTALPFTKLDDYVIDHIVPRAKGGPDAMVNYVLTTHETNEAKGDRTPFEWLRSAPDWDAYNKRVAARAHTLRNKKVQLLTREDAPELVQRYTALAETAWVSKLAQAIVNLTFGWTNANDEEGRKRVIVVSGGLTARVRRKYSLDKLLYTNTTDPEVLTKQVKNRSDKRHHALDAMVLTYIPQWARDPGKEGFFRFPAEFRDATGREDYSAIQRLFKDKLAKTTPRFLAYERSGLADTAYGRRTDGEKCVVVQRTPLRGLAYKQVKMKSVFSLEYAATQVAAIRDGRIQAEMKRVIAAQPNEAQWRAICDALENGTHSGFEGVRVVKVTVNRNEDPAEFKDLSKDGTGALRMRKKEHQGQFVFLDSKGRPRVEVVRVFDSLRDVKARLAKEHAGLKEVGFFQSMCQVELDQPVKHGNCTLLPGTYLLNTIKQDGRAQLTSAGGDKSPEIGLVKLLPAGFRRKA

SEQ ID NO: 8701 - protein, 1069 aa, synthetic construct
  REGION 1..1069: note = Synthetic
MKKVLGIDIGVASIGWAYLSEAENSTETSQILQTGVRIVPLNSDAKQNFTKGISYSPNQVRRQKRTTRRNLQRYRLRRHLLKKVLDSTGMSPNSELFGLPSLALYELRVKAVSEQISLAEIGRILYHLNQKRGYRSSRKSDAAETEQQGDYLQAISHRKAILKEKNQTVGQYFAEQLSLNTHYRIKQQIFPRECYITEFDTIWKTQQEFYPNVLTDTLGKQLRDEIIYYQRPLKSQKESVADCRFFPNHKVAPKSSPVFQLFKLWQNLNALRIERKSGEVVDITLEQRKQLFARLNETDRLSATEVLKELGLKPTRDFKLNFEKFEENRTRAAILKVANEAQINRPDLFTFDPYDNPDQQPFYRLWHLLYSIDEPEHLLAALQKPPFLFKAEEAQQLSKVGFKAEFGSLSTRAIRKLLPFLEQGMVYSDACEAAGFNHSDSLTKTENKQRTLADTLALLKPNSLRNPTVEKITNQLVNLVNAILTHPDLGRPDEIRVELGRELKQNAEQRNRTFKNNNERDRERQKIEKHLQEHGVRKPSSSLIEKYRLWEETGYLSLYTGNPISLSSLINGEVDVEHIIPKARLFDDSFVNKTLCERHLNEAKGDQTAYDFMRGQGDATFTAYTERIALAYERQNGINKTKRERLLMTAADIPQDFVNRQLRETQYIARMVKDLLSEVCYQVYTTTGGVTSHLRHSWGLDAVLQDLNFEKYEAAGRTRIEGNRKVIEDWSKRDDHRHHAIDALVVACTKQAYIQRLNLLNQQLTQRYEAKESAWKFPMPWPHFVRDARQSIAQILVSFKAGKKVATLSRNEKTGQISYAPRGPLHEESIYGRIKHNQQSKYVIKYTLGQGFDLKKAGTIVDKRVRELVQKRLEDFNNDTVKAFKEPIWFNEAQQIPIRAVRCFARLNEAPPIGFDADNKPTAFVKLGNNHHVAIYEDANGKRYEQAVTFWEAVERRRDGQPIIHPTHENGARLLVSIQQNQYFIFGLEPELLEEAVSSHDWPLISKHLYRVQSIAEGDYWFRHHLETQNDKSEIAKALKKYIRISSLSSMTGTKVHLNPLGQIIKIGE

SEQ ID NO: 8702 - protein, 1050 aa, synthetic construct
  REGION 1..1050: note = Synthetic
MVENMTKKVFAFDLGSGSLGECVREGDKITYLHSLLLDADFASIKNQRIQRRGYRTRLAHQARERWWQKIAQAVGLEVLATQQPTFDNPTLKPDERMLREFAQPGDETLYTSCLLRMALIQGKPLASWQVYKAVWSALQHRGYDTNLPWKSDIVRIQKKLNAGEPLTAREQKIWEDEKQDMSSASLYLKAISDWPEGYRLPCYYEAYKLGLWTPQNPKHFQQKVGVYPLAARNKEGTEMVVAPRNLVEKELLLLLAQAAKQYPALNGKEKFIIYGPAEQPYASVKNREQFGEYRGKEWEWQGVLAQKTPRFDNRALMACRLIPRFHVCKADTPIAQETLLVLNLKNMRFTLGLDTRAALTAEQLKRIYREYVGNLKKTGNNSLGKREWAKVVRECGGVVNENQAEVAMPSKSGRCRFSRPALKLLKELILSGKNPHDFYREKTDTLTNVDPKKGLVKEDFNFLLAMPNDWDKIHVADCREEDKALTLAERAEEITAILGNITHPIVRHRLHFLWQELERLQKQYGTPDEVVLEVVRDDFLSDEQKKEFERQQKKNQKINAALAQEYGEKNVLKMRLFQEQNGVDLYDTSENNHLRSTDLDQYDVDHIVPRAQGGADSYVNKVLTKRALNEAKGKKTPYEWLGKDTAIWSAFLSNIKQACRKGGLSDDKIELLTAPDAAELEKSRRDLHATAYLEKLAQRIVALHFGWGLNTKDDNRRIFVATGGQTAYVRRVFHLDRLLHQSSTKEEFRQMIANQELNKKNRANKRHHALDALVLSLIRDIRYNVKDDRLETPIYFNAPFCDKALRQVYPEEVKTVKPKLRETMYGLRERITNGKKEYFIVTRFNSLVANFQKISDAKKMIPYVFDPDLRQQLETKFKEPGLTEESWQEWLDTWSEHGRKIRKMTKVESGPFTEKDILIKNGRRQIGCFYELGKMKGQFLTNKEQHKGQIVYRDSKGKWCVNPVYLWESLPKKLAEAKKEYGKVLFFRSGQLVEVQENVGKVQKGVYRLRSIQTKGQMTIESLDTQILEHPMIGKMLDEGKMRLFKTSKG

SEQ ID NO: 8703 - protein, 1185 aa, synthetic construct
  REGION 1..1185: note = Synthetic
MSTLKENQFPYRLGVDLGTSSVGVAIYRINDKGDIIALEHLDSYIFGEPVAPKEMVTLNTARRAARLIRRQVERKAARLRKIGYIAQSLGISKPALDADKEDVIWLRARAVEEEISLPQLIKVFCHMVKNRGYKGSIAEKTVGTKLKHTEGLLQDGKTLGQLLWEEKQKALKGQPWRKIEEDGTFIYRRMVEEEFERIWREQSKYHPELNGMYQVWGNNMFPDYPKQAEISLHDAFHSALFYQHPIKWELETVGACPLFPEEKRASCAQMAYQSYRLAKEIANLRIYEKGGKEPFRLTLAQQTQLFNYIESNTQAYSQESGVVSFHRIYNFLGLPDNASFTVDRGSKKGLKGNTTLFAFEKAGLLNEWANLSDKEQELVIEFLSNITNMSDVAENEDAYIRERFGKLTANIIALDSEKQAGAEFVVANKSKLSRLVLEQGRGSYSVKGLRWLAEEARQGHLDDSSEEEYVAARVAKNKVYTGKLRTVAAIKEQESITDPVMSRALAEFHRVMTYITHKYGNPQEIVVELSREIKNSLRRRQFLERQNELQAQERTKAIAELQKGGVLVSPRNIDKYLLWEEQNHMCPYSGQLISFTQAFDEKQTQVDHIIPRAGDIAGPNTLENKVLAFTQENKDKTNRLPYEWKFKEDIDAYLAFNQEKKAKKKKGEYSTAPFGNNSPLINFVQHLWGLYSKEKKGYYSARERKFKPTQKGARILRKINNLLATPAQVKAEFVNRQNQETAWIGKIVLGWCKDICPKVTPSFGALTAYLRGQLQFDRILPLIRLGEKKPLFDKDDREIDAKKWEELFAVPHLAYEQADALAADFNKYCDGLADERKPMTSSDKQKAFYEFCASQRVLFQFNKRCDYRHHAVDAAVIGLCGMALVQRAAVHNRKYGTLHKIEWRNADGTRDKSKDIAGFTVDSLPLYAALKDEVKKRLTNYVVWHKPDHFPSGRFFDETAYSIQKKDGEDRFVKRAGLESFIKSDAQKTIANLEKLLFSDTIKEAILTQFKERLAKGLTQEEALCGKKDDPQDGIYYRGNKVKKAKYMYATSGIRKFDDNADKKIVTYDRNGRQHQKGYQNYGYACMDFDAETGKPVALVPLWKYQQQKQVVPSGTVRIFAGDILFDKTNKQFYKVQKFSAKKGLMLCLTTEKPQKNDLNITTVKHLKNYSVVSTRKDIAKFKSE

SEQ ID NO: 8704 - protein, 1183 aa, synthetic construct
  REGION 1..1183: note = Synthetic
MANYRWGIDLGTSSIGVAVYETDNNGKIISLKHLDSYIFGEPVAPKEMVTLNTARRSARLIRRQVERKAARLKKMSYIAKSLGVTPEVLRATPEDVVALRAKAVREEISIPQLIKVLSHIVKNRGYKGTLSADDKGTVGKKLSQTAQALTGGKTLGELLYERKTQANGQPWRKVEEGGTFIYRQLVEDEFARIWDTQAKFHPELNGSYAVWGDKMFPDFPGKTEILLKEAFHSAMFYQRPIKWELETVGNCEIYPTEKRAAAAQIAYQHYRMAKTLADLRVRNKNTRESVPLTLAQKSQLFEFLGAHTAEYSPETKAVPFTVLYKVLGLPEGCTFTLDRTYHARGGLKGNTTLYAFEKAGVLNEWSNLTDTVQELVLEFFANVSNLSDIEDNSDAYIKERVPELTKNLKPTPQACEACCRFILLLKAHGVLGELVLEQGRSSYSIKALKMLTERIMQGEQEADILADIEAQKTHPQGKFRSTEAILKEQAINDPVVIKALNEFHRVVQYLLYRNWKPKEIIIELSRDMKKSLSRRQFLEAQNKAQADERNAAKKELVEEFGVLPTPNNIERYLLWKEQAGMSPYSDNGSTKISDAEAFDSRETQVDHIIPQQGEIGGPNTFGNKVLVFTKENHKKSNQLPYQYDNGKFKEEIDAYKAWLVDNNLLGKKRSNRKKVEPFYPASNLIKFVERLRILKEKEWKWSQRDNEFWLTPKGRNIEDKINNLLKTPEELKQDFVDRQNQETAWIGKVVLGWCKDICFAQPTFGTLTAYLRRQLQFDRIIPQIRFSEGKPLYDTDKKMLDSNKLKEILENVPYDKLSAIKPEFEKYCADFFKPCDTTKDYAKALARFQTEIYGSLDKRCDHRHHAVDAAVIGLCSVSIVQKAQNFYKKHNTLYIKAYDERGNRDKKHDVEGFLLENDTIPNLARIRKEVQARLTNYVVWHKPDHFPSGALFDQTAYNILPKDGEKRFVKRSPLVSFLKANEKKTLENLEKLLFCDAVKNEIITQFKERLAQGMTQEEALCGKKDNPTDGIYYRGNKVKQVKYMYLVGRGIRVFDENADKEIFSTDNVGTQHKKAYQNGGYACMDFDAKTGKRLALIPLWQYQSNKQVPPGVVRVFIGDMLFNKKDKEFYKIKQFNSHFGVGIVVASEVKGDLAFTSNLKNYSVVSTRQDIAKLKDNEHTTSD

SEQ ID NO: 8705 - protein, 992 aa, synthetic construct
  REGION 1..992: note = Synthetic
MVEEEFERIWREQSKYHPELNGMYQVWGNNMFPDYPKQPEISLHDAFHSALFYQHPIKWELETVGACPLFPEEKRASCAQMAYQSYRLAKEIANLRIYEKGGKDSFRLTLAQQAQLFNYIESNTQAYSQESGVVSFRRIYNFLGLPDNASFTVDRGSKKGLKGNTTLFAFEKAGLLNEWANLSDKEQELVIEFLSNITNMSDVAENEDAYIRERFGKLTANIIALDSEKQAGAEFVVANKSKLSRLVLEQGRGSYSVKGLRWLAEEARQGHLDDSSEEEYVAARVAKNKVYTGKLRTVAAIKEQESITDPVMSRALAEFHRVMTYITHKYGNPQEIVVELSREIKNSLRRRQFLERQNELQAQERTKAIAELQKGGVLVSPRNIDKYLLWEEQNHTCPYSGQLISFTQAFDEKQTQVDHIIPRAGDIAGPNTLENKVLAFTQENKDKTNRLPYEWKFKEDIDAYLAFNQEKKAKKKKGEEAVATFGNNSPLINFVQHLWGLYNKEKKGYYSARERKFKPTQKGARILRKINNLLATPAQIKTDFVNRQNQETAWIGKIVLAWCKDICPKVTPSFGALTAYLRGQLQFDRILPLIRLDEEKPLFDKDDREIDEKKWKELFAVPHLAYEQADALAADFNKYCDGLADDKKPMTSSDKQKVFYEFCASQRVLFQFNKRCDYRHHAVDAAVIGLCGMALVQRAAVHNRKYGTLHKIEWRNADGTRDKSKDIAGFTVDSLPLYAALKDEVKKRLTNYVVWHKPDHFPSGRFFDETAYSIQKKDGEDRFVKRAGLESFIKPNAQKTIANLEKLLFSDTIKEAILTQFKERLAKGLTQEEALCGKKDDPQDGIYYRGNKVKKAKYMYLTGRGIRAFDPNADKVIISRDKNEKEHQKGYQNGGYACMDFDSKTGKRIALIPLWRYKQNQHVPPEVVRVFLGDMLYDGQTKQFYKVQQFSAQAGLVLKLSTEVLGSTVRTSNLKNYSVVLTRKDIAKFKSE

SEQ ID NO: 8706 - protein, 1178 aa, synthetic construct
  REGION 1..1178: note = Synthetic
MANYRWGIDLGTSSIGVAVYETDNNGKIISLKHLDSYIFGEPVAPKEMVTLNTARRSARLIRRQVERKVARLKKMSYIAKSLGVTPEVLRATPEDVVALRAKAVREEISIPQLIKVLSHIVKNRGYKGTLSADDKGTVGKKLSQTAQALTGGKTLGELLYERKTQANGQPWRKVEEDGTFIYRQLVEDEFARIWDTQSKFHPELNGSYAVWGDKMFPDFPGKTEISLKDAFHSAMFYQRPIKWELETVGNCEIYPTEKRAAAAQIAYQHYRMAKTLADLRVRNKNTRESVPLTLAQKSQLFEFLDAHTAEYSPETKAVPFATLYKVLGLPEGCTFTLDRTYHARGGLKGNTTLYSFEKAGVLNAWSNLTDTVQELVLEFFANVSNLSDIEDNSDAYIKERVPELTKNLKPTPQACEACYQFILLLKARGVLGELVLEQGRSSYSIKALKMLTERIIQGEQEADILAEIEAQKTHPQGKFRSTEAILKEQAINDPVVSRALAEFRRVVAYTLHKFGQPSEVVVELSRDIKNSLRRRDFLEKQNKIQAETRKEAITALQANHTLVSPRNIEKYLLWEEQEHYCPYSGRPISFGQAFDEKQTQVDHIIPQRGEIAGPNVFENKVLAFTDQNKDKSNRLPYEWKFQADIDDYLALQATNKQKKKNKETVNYDFGRHSPLINFVQHLWTLYSKEKKGYYSARDHKYKPTQKGARILRKINNLLATPGEVKQDFVARQNQETAWIGKIVLDWCKDFCPKVTPSYGALTAYLRGQLHFEDVLPLIRLQEGKPLYNKDDKEIDSAKWQELYTKHQLNYKEAGPLQADFEQYCKEQNILTESDKQKAYFNFVREQRTQLQFNKRCDHRHHAVDAAVIGLCDLSLVQRAAIHNKKNGTLYKIEGINPDGTRNKDKDVPGLMLDNIPQYATLRAAVQARLTNYVVWHKPDHFPSGALFDQTAYNILPKDGEKRFVKRAPLVSFLKSNEKKTLENLEKLLFCDAVKNEIITQFKERLAQGMTQEEALCGKKDNPTDGIYYRGNKVKQVKYMYLVGRGIRVFDENADKEVFSTDNVGTQHKKNYQNGGYACMDFDEKTGNKLALIPLWQYSSKKQVSPGVVRVFIGDMLFDKEQKQFYTIKQFSAQAGLVLQLNTEVQKFEVRTSNLKNYSVVSTRQDIAKLKDNEHTTSD

SEQ ID NO: 8707 - protein, 1164 aa, synthetic construct
  REGION 1..1164: note = Synthetic
MKDIKTDFSYRLGVDLGTSSIGVAIYGLDKDGKINKLEHLDSYIFGEPIKPKDMVTSNTDRRTARLIRRQMERKAARFRKIAYIAKTLGVTQKDLYAIRNQDVHKLRAEALFAPLTLTQLIKVLCHLVKNRGYKGGIKDGTVDKKLKQTEAMLCEGKTLGELLYERKLNAKGAPWRKVEEDGTFIYRKEVEREFELIWEEQSKHHPQLSGIYKVTYENMFPDFPNQKEISLKDAFRSALFYQRPIKWALESVGSCGIYPEEKRACTSQTAYQDYRLAKAVADLRLFNCFTGETRLLNQEQKDFIFNYVSTSFKDYAKETVMVPFKTIYEKLGLSDAEMFTVDRRGGIKGGLKGNTTLYAFYSVGALGEWESLNEKSQELVLEFLNNITDFEDIEECEEGYIKQELPRLTKNIKSSDENQKQAADFVLCLKEKGVFLNQNFRLENDRASYGITALKTLAGEIKSGRKEEDVIAEIKPVEDEIKDKMRSAEKIKRQEAINDPVIGKALNEFHRVMRYIISRYGNPSEIVVELSREIKNSLKRREFLEKQNNAAAKERQNAISVLQENEAHVSPRNIEKYLLWEEQKHICPYSGAEISLFQALDEKQTQIDHIIPQNWSGGSGGPNTFDNKVLVLTQENKDKNNRLPYEWKFKEDISQYLSWRSENKNKKKKGEQTEKFGSHSPLINFVQHLWGMYAKEQQGFKSERTRKWTPTQKGARILRKINNLLILPEQVKSDFSNRQNQETAWIGKIVLGWCKDICPRVTPSYGGLTAYLREAFRFDGVLPAVRIAEGKPLFDKDDKEIDSKKWQELFNKEELSYDKAEALKNDFEAYLKQQSVPCNTEEDKRKMFKAFCAEQRVLLKFNKRCDHRHHAVDAAVIGLCDLSMIKRASDHNAKHGTLYTIKCFDENGTRIREKDIPGFKVDNIPQYDVLKESVKKYLTNYIVWHKPDHYPSGKFFEETAYNVKEVEGVKRYVKRKELKDILGEEKDVDKLIKIVCELLACESVKKEIVSQLRQGKLDNFVFRGNKINKVKVFFKRKGFYKFNPNADKSIGGFKYYMNNPQGGYACMDFDKERGALICGVPLWKYDVNKPVKDNIVRFFINDMVFDKETKSFYVINNFQVVNGWMGIVPASEAVKKAKSVRNIKNIILCKTRQDIAKIKKEYGK

SEQ ID NO: 8708 - protein, 1177 aa, synthetic construct
  REGION 1..1177: note = Synthetic
MANYRWGIDLGTSSIGVAVYETDNNGKIISLKHLDSYIFGEPVAPKEMVTLNTARRSARLIRRQVERKAARLKKMSYIAKSLGVTPEVLRATPEDVVALRAKAVREEISIPQLIKVLSHIVKNRGYKGTLSADDKGTVGKKLSQTAQALTGGKTLGELLYERKTQANGQPWRKVEEDGTFIYRQLVEDEFARIWDTQAKFHPELNGSYAVWGDKMFPDFPGKTEISLKDAFHSAVFYQRPIKWELETVGNCEIYPTEKRAAAAQIAYQHYRMAKTLADLRVRNKNTRESVPLTLAQKSQLFEFLGAHTAEYSPETKAVPFTVLYKVLGLPEDCTFTLDRTYHARGGLKGNITLYTFEKAGVLNEWSNLTDTVQELVLEFFANVANLSDIEDNSDAYIKERVPELTKNLKPTPQACEACCRFILLLKAHGVLGELVLEQGRSSYSIKALKMLTERIMQGEQEADILADIEAQKTHPQGKFRSTEAILKEQAINDPVISRALAEFRRVISYTLHKFGQPSEVVVELSRDIKNSLRRRDFLEKQNKIQADTRKEAITALQANHTLVSPRNIEKYLLWEEQEHYCPYSGRPISFGQAFDEKQTQVDHIIPQRGEIAGPNVFENKVLAFTDQNKDKSNRLPYEWKFQADIDDYLALQATNKQKKKNKETVNYDFGRHSPLINFVQHLWTLYSKEKKGHYSARDRKWKPTQKGARILRKINNLLATPDEVKQDFVARQNQETAWIGKIVLDWCKDFCPKVTPSYGALTAYLRWQLHFEDVLPLIRLQEGKPLYDKDDKEIDGNKWRELYAPQQDYRQAKALQADFEQYCQGKDLATESDKQKAFVDFVREQRTQLQFNKRCDHRHHAVDAAVIGLCDLSLVQKASRHHGKYGTLYKIEWIDENGTRNRDKDIPGFTLDNIPQYATLRAEVQARLTNYVVWHKPDHFPSGALFDQTAYNILPKDGEKRFVKRAPLVSFLKSNEKKTLENLEKLLFCDAVKNEIITQFKERLAQGMTQEEALCGKKDDPSDGIYYRGNKVKQVKYMYLTGRGIRVFDENADKEISSTDKVGVQHKKAYQNGGYACMDFDAKTGKRLALIPLWQYPSKKQVPSGVVRVFIGDMLFDRENRKFYKIKQFNAGKGVGFLEASEVKGDLAFTSNLKNYSVVSTRQDIAKLKDNEHTTSD

SEQ ID NO: 8709 - protein, 1014 aa, synthetic construct
  REGION 954..1011: note = misc_feature - Xaa can be any naturally occurring amino acid
  REGION 1..1014: note = Synthetic
MANYRWGIDLGTSSIGVAVYETDDNGKILSLKHLDSYIFGEPVAPKEMKTLNTARRAARLIRRQVERKAARLKKMSYIAKSLGVTPEVLRATPEDVIALRAQAVREEISIPQLIKVLSHIVKNRGYKGTLSAEDKGTVGKKLSQTAQALTGGKTLGELLYERKTQANGQPWRKVEEDGTFIYRQLVEDEFARIWDTQAKFHPELNGSYAVWGDKMFPDFPGKTEISLKDAFHSAMFYQRPIKWELETVGNCEIYPTEKRAATAQIAYQHYRMAKVLSDLRVRTKNTRESVPLTLAQKSQLFEFLDAHTAEYSPETKAVPFATLYKELGLPEGCTFTLDRTYHARGGLKGNTTLYAFEKAGVLNEWANLTDTVQELVLEFLANVSNLSDIMDNSDAYIKDRVPELTKNLKPTQQDCEACYQFILKLKERNVLPELSLEQGRSSYSIKALKMLTERIMQGEQEADVLAEIEAQKTHPQGKFRSTEAILNEQAINDPVVSRALAEFRRVMAYTLHKFGQPAEVVVELSRDIKNSLRRRQFLEGQNKIQADARKEAIAELQAHHTLVSPRNIEKYLLWEEQDKMCPYSGRSISFGQAFDEKQTQVDHIIPQRGEIGGPNVFENKVLAFTDQNKEKSNRLPYEWKFQADIDDYLALQATNKQKKKNKEAVNYDFGRHSTLINFVQHLWALYSKEKKGYSSARDHKYKPTQKGARILRKINNLLATPDEVKQDFVARQNQETAWIGKIVLDWCKDFCPKVTPSYGALTAYLRGQLHFEDVLPLIRLQEGKTLYDKDDKEIDPAKWQELYTKHQLNYKEAGTLQEDFEKYCKDKDLLTESDKQKAYFNFVREQRTQLQFNKRCDHRHHAVDAAVIGLCDLSLVQKASVHNRKYGTLHKIEGINPDGSRNKDKDIPGLMLDNIPQYAALREAVQARLTNYVVWHKPDHFPSGALFDQTAYNXXXXXXXXXXXXXXXXXXXXXXXXXXXXXXXXXXXXXXXXXXXXXXXXXXXXXXXXXXRRG

SEQ ID NO: 8710 - protein, 995 aa, synthetic construct
  REGION 1..995: note = Synthetic
MSKVLGLDIGANSIGWALIDDEENDIIGAGVRVFKEGVNLKGVKEESKNVERRAARLARRQHKRRSQRRNRLVALLKTLEMFPENNEDISDYYAQDPYELRKKGLYEKLTMYEFGRVLLHICRRRGFKSSRKTDISEEGKIFEGKDGIVGINQTRDSIREGGFKTIGEYLASLDPHVIRRRNRFTLRDMYEEEFNLMWEKQQSFYPLQLSNEFKEAIAEVILSQRKLKSQKALVGNCGLEPNKKTAPKSSPAFQYFRILEQLSRILISIPHTGRYNDPLNEEERRMLIDKLSVTEKLKFSDMRKMLNLPGESDINIEEEGGRLLGNTTYARLIKVFGKKRWAGFSEEEKEQIWHTFHFADNHEWLKEYALKKWSITPDEIKELGKVALEKEYARFSKKSLKKIIPQLEEGLTLDKAKIEAGYTPEYEIEKSLSAYLPLPENIRNPIVQQALYELRHVVNAVIRTYGKPDIARVELAREMKKPKQKREKMRSELRKRQMKFEEIKSILKERLGFIDPKRDEIHKYMLWEECRETCPYTGRKISLSALYGGDFEVEHIIPYKRSLDDSLFNKTVCLREENQIKGDRTPYEAYSGDRQKYEEIILRVQKTSMPRGKKNLFAIKELKDDFAHRQLSDTAYISRETRKYLGSTIKKVQAVKGGSTAKLRYYWGLNSILGVRDIKMRDDHRHHAVDALVIANTTYAFVNTLSRYHSMDVEPHESRFPLPWEQFRNDAESVVRNIFVSHRLGKKATGQLHEETYYGKIRNTDGEPYFVVRKKLGTLTAKQIANIVDPVVKTQVFERLEEKGIDIESSNKIPADAFVETLYMPDRKTPIKSVRVKVPSTTMIQLYKDKELYVDPGSNHHIVIFENEEGKRDGIVVSLFEAAQRLRRNEPVIQKTWKPEWHFVMSLSIDELILLDVDEKNIDWGDTGLALRYSKALYRVQKMDVNKIITLRHHLVARLKDDEGKEFGREHRIPSTLRGLKVKIDHIGRLRRAYD

SEQ ID NO: 8711 - protein, 1516 aa, synthetic construct
  REGION 1..1516: note = Synthetic
MKNKFGLDLGTNSIGWAVVATGQEEDAENSGKILLAGSRILPMDAATLSDFAKGNTQSQARERTRLRLTRRIIERSRLRRHRLNRVLRVLGWLPEHYAGQLDRYGKFLNDSEPQLAWEPDANGAGPRFLFREAFEEMLADFRSRHGDGQRIPYDWTLYYLRQKALTRKISACELAWVLHSFNQKRGYFQLRSETEVKDEDNSKKEEYYSLTVTKVENTGEMSRGKAAYNVHFENGMVYPNCTAREAPLWEGKVKEFIVTTKVDAEGRPVCDKEGNVSRTFRVPKEDDWGLVKVRTEELIRQSEKTVGQYIYDSLMEAPQRKIRGAYLRTVDRKFYLEEIRRILECQKQFHPELQSPRCLQECIAELYPHNLPHARNLSRRDLCALLVDDVLFYQRPLRSQKGLVSECPYEFREYVDRTTGEIRKSPIKCIPCSHPLFQEFRLWQFIGNLRIYRRIDESEGKVSVNHDITAQCLPDHEAYVRLFDDLSQHKSIKQAQVLRHFKLSEKYCRWNYVEDKEYPAYTTRAQLQSRLKKAGAPKDFLQGLTPGGKTNRETALWHLLYSISNMEELEKALRKFAAQNGLDADAFVSAFRSCPPFNDGYAAYSARAIGRLLPLMRRGSRWSAEAIDAATRQRIERILNGEVGDGLSERTCRLAIGEPPARTALTDFQGLSPWLVCYVVYDRHSEAGQVEKWETPDDIDRFLRQFRHHSLRNPIVEQVVLETLRVVRDVWKDSRVGHIDEIHVEIGRDMKNPADKRQKMTETINRNEQNNLRIKALLEELSHPEYEVENVRPYSPIQQEKLRIYEETVLDEARKKNQLDDDIAQIVRKFNESDEKKRPTPADIRRYKLWLEQRYRSPYTGRFIPLARLFTRDYEIEHIVPQKLYYDDSFQNKVICEAAVNKLKDCTLARNFIEEQGGSTIECGGQTVAILKAEAYELLVKDTYAHNPRKLNNLLRTEVPEEFSSRQLNDSRYISRYIVQLLSNIVRTRDENGNCEDAANSRNLIVCSGAVTDRVKKDWGLNDVWNKLIAPRFERLNHKMGSQCFGQWENKEGKRVFQINLPLEYQKGFSRKRIDHRHHALDAIAIACISRNVVNYLNNVSAIDGVHTTREDLRRRLCEKHRTDSNGNYEYLLRKPWPTFTQETADALDRIVVSFKQNLRVLTRTANQYQCYDAETGKKVWKRQEKGDRFAIRRSLHRSSFYGHVNIHSKKPVSLKDALKFPQRIVDKSIRKKVFELLQLNYTPKAVEEYFRENQSILFPELDLKNISVYYFTDEMPTKDWKVASRKPLEPGTQIENITDSGIRNILTRHLERYGGKRREAFSPEGLEYLNSHLRELNNGRPHQPIRRVRIMKTKGTKFIVGNRGSKKKKYVETAEDTNLYFAVYLDKNGKRTYDTPPLNIVIERLKQGLPPVPERNDNGARLLFTLSPNDLVYVPTPDEIGTPLDVQQLQRDRIYKMVSAFGPQCFFIPAFVANPIIQNTELGSKNKAERCWTGEMIKKICLPLRVDRTGQLHFR

SEQ ID NO: 8712 - protein, 1202 aa, synthetic construct
  REGION 1..1202: note = Synthetic
MPQYYRYILGIDLGIASTGTALVLVGPNNEFLKILDMGVRTFITPDGASERRGKRMERKHTRRKRQRLSRVRLVLQALGLLPAAEQEMHTLTLANPYQLRANAVQGKLENIAELGRCCLHMAKFRGAGFLTQQEEAMEAGHTLAAPELTAEAAPVTATAKKGAAPKKDTQKTASAYRKLEEVLGGTGQTISSFFVQRLNNGNPVRRRKFHLGTGNNGTAETGYAALAGTKEVEYAVPRFLVKEEFRRMWATQRQHYPHLTPAMEEAVYDAIFQDAPHAPYATGNCTFVPGEKRLPRMHRLSETRRIYEQINHIRYSTPEGERFLTKPVRDALVTKALHQGVALTKTELRKTISALTNEKVLGVNLADEVKSIQPFSHIKAFANVPAWATFSQQEQDSIIDFIAEPAIDPQDPASVLYPEDALLALLCQKLQMQGPQAEAVASQVMAALPQGRSNLGITATRQIIEKLREGYEEAVPDETGAPCLVWRPHTHRSAADACAFMAEAERIRAIGGNYPLLPYYAEILQQDVTPIHPWHKHTAAEEEREQGRVPNPVVHVVLNQLRKVVNEIIGLYGKPQRIHVELARELGLSAKKRDELIKEMQKNERENEAIHRELAELHLAPSKRNRTKYKLWLQQGKRSLFTLQEIEASDIAACEIEHLIPRSHGGTNTFMNLCLVPDAENKAKGEQFPYDVIQKLAKDKWSEISKIIHDPKFPKAKAWRFGPEAATRFGETGDEEQTDRRLTDTRYMAKLATRYLHAVCPDIVPVKGGTTAALRRYWGLEGLEYELLGVPVTKDIVDPETGEVHINPATGYPAHNPLWAAKPRIDHRHHALDALVTACTTRAMVKKMVEQEKAGQRISEFPQPFGDSTAHFRHHVQNHLLCVTPSPKAEHGMAGQLHDATKYRILPEPEGKPAKEGEFTIRFSRALSKITSYNDIANIVFNTKTIPLATPQAQQAYQQCLHIVQVINNHLPEAEQALHRAQQEAAENGKPVRALPAKVQEANTVSMAIQLAQTKGLLGATYPCLARKSLVGINRALQFGYEPKNNYRTDFFVDSKGKVGWECIRRIDINNPEFVPQWKKDGYKRLWGLCNGDVLEVLPTPALHEQLGPLLPKGPVFFVVQKMSNGRLQCNLLHDARALDGSNQAVQAGLTKHPAYARWTTGENGLSYYCQLQARKVELTPFGKIARKHARLWHGKKMGKKP

SEQ ID NO: 8713 - protein, 1183 aa, synthetic construct
  REGION 1..1183: note = Synthetic
LSTRFLLEENVVQHYRYRLGVDMGIASIGTALVQIDSEGVPLKILDLGVRTFSTPEGAAERRAKRLERKHIRRKRQRLAKVRRILQEHGLLPTDTESLKQLILKEPYSLRALAAINRVSRLEDMGRCFLHMAKFRGAGFLTQQEEQQASGDEDASVPSNKDKQKTANVYRKLEDAVRDKKQTLSQYLVELLEKKMPVRRRKFLVDQNKIEHAVPRFLVKEEFRRIWETQRTFYPELTKAMEEAVYREIFQDFPHAPYATGNCTLLPRNEDGSENKRLPRMHRLAEKRRIYEQINNIRYTTPEGECFLSRDLRDHLVTLAYDKGQTLGKKLLKSEITVATGLKVLSVNLSDDDTSIKGFCHVAAFADIPTWHTMSDAEQDAVISFIAEPVLNPADPTSELYPEDEFLEKLCAMLRLEGPNAEDDASRAIALLAKDRSNLGLTATNRVLEKLTVGHEVDVPTAAGETQPVWRAHTHRTAADACGFTAEEERIRALQGSYASLPYYGEILRHDVTTIHPWHKKNAAPEEERWGRIPNPVVHVALNQLRKVVNEIVGLYGKPESIHVEFARELGMSAVKREALIKEMQKNERENEHITNELIALGLTPSRTNRIKYKLWEEQGKRSLYSLQEIKASDIDACEIDHLIPQSKGGTDSRMNLCLCFADENKAKGDTFPYDMIQKTAPEKWKEISKAISEKNFPKAKAWRFSPDAATRYDLHGDEDQTDSRLTDTSYMAKMGARYLWALCSDVVAVKGRITSDLRHLWGLDGLEYELFGLSINEHIVDEQTGEVTLNPATGYPALNPLWVRKPRIDHRHHALDALVAACTTRGMVARLVREEKSGKKGKERSNFPVPFGACAADFRSQALRALQQVTPSPKAEHGTAGQLHDATKYRILRPRPAKGDYLIRYQRGLDKIKDKNAVTKIMFNTNTISLDDETVKKAAAQCQAIISTIERHYPAAEEALAAQQAEAQSGRLPRAKEGKAKEEAVVRKAIDLAQKAGQLGSSYPCLDYKRLVAVNESLQFGYEPKSNYCTDFYETPAGKVGWECITRIDANDSGFVPKWKEAGGKHIWSLRIDDVIEITPTDELRQELDSRCPPGKVYLVVQKMGKDYLQCNLLHDARPLNGRNPAVQAGLEAHAEYTRWDTGGIGLKSYCELSARKIEISPFGKILRKHKRLRSGKKMAKKA

SEQ ID NO: 8714 - protein, 1091 aa, synthetic construct
  REGION 1..1091: note = Synthetic
MATRHINVGIDVGSHSVGLAAIEVDGNGVPTRVLSALSHIHDSGLDKDGAKNALTRRNTSGAARRTRRLIRRRRRRLKNLDDTLQRLGYPVPDYGDDKDPYLIWRVRAELADHPLPEEARRPAIAMAVRHIARHRGWRNPYTKAESLLEPAPDSSFMEAVRNRITERTGEILEDGLTPGQIMQQVALTRRLPMRGQTGLLGKIHQSDNANEIRRICAVQGVSDEDCRAIILAVFAAESPRGSAVGRVGRDPLPGQEALPRAPKCDPEFQRYRIISITANLRIHDNGEARPLSADERRRVVSFLLGSSTDDPGWDDVSDLLGIARQDLHGTARLTADGERSAARPPIDATDRVVRKCPIKALQSWWAEADTERRSAMVHQLYEATEDSECAEFLSSLSEKEQGALDKVHLPVGRAAYSRDSLTRLNEHMLTTTDDLHEARKAVFGVDDEWVPPAEPIGTPVGNPAVDRTVKVVARFLNAVKDVYGVPERIQVEHVRDGFVSERMAREIDLENKRRFEQNQRTIAQIHEALGRGGEVRRSDVIRYEAITLQDSKCLYCGNPIGYDDAELDHIVPQAGTGSNNHRENLVAVCGPCNQQKSKKIFSEWAASCDRPGVSVEAAVKRVRAWRNQPESMDRTELSRLKKDVITRLRRTREDPPIDERSMESVAWMANELRHRIAAAFPEPRTQVAVYRGSATAAARRAAGIDSRVNLLGEKGRKDRLDRRHHAVDAAVVALMRPGIAKTLAERSSLRWEQLYRRENQTWRDNAWLSPEAREKFEQWKNSMLRLVELLNAALAEDTIYVTENIRLRLGDGAAHDDTIRSLGRVRLGDGLTAAQVDRASSEALWCALTRQPDYDQKKGLPADPQRVIRVHGTPVRAEEQVTVFTKNKKSGSPTEKPFAAIPVRGGYAEISSTIHHARIYRIEGRKPAYAMLRVFSYDLQRHRTENLFAVEVLPQSISMRCAEPKLRAALRNHTATYLGWVVVGDELEVPMSGFSSKGKIGDFLVEYPDTRRWRVHGFYSETRLRLRPSQIAAEGLPDDAPDAVHKTLGTPGWVIAVNALGASHPRVVRRDTLGRPRTASTAGLPVSWRIE

SEQ ID NO: 8715 - protein, 540 aa, synthetic construct
  REGION 1..540: note = Synthetic
MVQDSVCVYCGGTIGYLTCQLDHIVPQAGPGSNNRRENLVAVCERCNRSKSNTPFATWAQDCGISGVSVEEAVARVRRWRNIQDGRAQSAQLRRLQKNVIARLRRTDEDPEIDARSMESVAWMANELHHRVQSAYPSAEVAVYRGSLTAGARRAAGIDSRVNLLGERGKKDRLDRRHHAVDAAVIALMNPSVAKTLAERSSQRWAQRLSGQEETWKSFTGATPGARDRFDSWRDHMLRLTELLNAALAEDRVCVTENLRLRLGSGNAHHEIVRPLARHRLGDGLTAVQVDRASSPALWCALTRQPDFTPRGGLPPSENRVIKVHGRRVTADDNITVFSQKPGDDAAEKPFAAIAVRGGFATIGLTIHHARLYRIEGRKPVYAMLRVFSHDLLPYRRDDLFSVPLALQTISVRCAWPKLRAALAEEAATYLGWVVVGDELEVPMESFTGGYIGGFRKEFPNITRWRIRGFESATVVKLRPNVLAAEGLTESVGDVAKIVGRGWRMSVNVLFSTHPTVVRRDALGRVRHSSAAGLPTTWTVR

SEQ ID NO: 8716 - protein, 660 aa, synthetic construct
  REGION 1..660: note = Synthetic
MLQTDDDLHAARMHVFGVDDAWRPPVEAIGAPVGNPSVDRTVKAVARFLKAVDNVWGYPESIQIEHVRDGFASERTARELDRENNRRFKQNQDTVTEIQKVYGVQGEVHRSDVMRYTTVTQQDCTCVYCGSTITYLTCQLDHIIPQAGIGSNNHRENLVAVCEPCNRSKSNLPFAVWAEKCDAPGVSVEEAVARVRKWRNIQPGRAQATRLKKLQKDVIARLRRTDEDPAIDTRSMESVAWMANELHQRVKSAYPSAKVAVYRGSITAGARRAAGIDSRVNLLGERGRKDRLDRRHHAVDAAVIAMMSPGIAKTLAERSNLRWSEWLSGKVETWKSFTGATPGARENFGAWRQHMLRLTELLNFAIAEDRIHVTENLRLRLGSGNAHDETVRPLILHRLGEGFTSAQVDRASSPALWCALTREPDFDFKTGLPASENRVIRVHGKRLNADDTVSFFSKKSGDDSKERPFAAISVRGGFAEIGSTIHHARIYRINDEKPIYAMLRVFTQDLIPHRHSDLFSAPLPPQSISVRCAEPKMKDALSAGTATYLGWVVTGDELEVPMEGFTTGQIGEFHKEFPTITRWRIRGFFDKARLRLRPALLASEGLRDASDPVRKTLSIPGWVISVNGICSTHPTVVRRDSLGRARNSTNSGLPTSWTIE

SEQ ID NO: 8717 - protein, 1085 aa, synthetic construct
  REGION 1..1085: note = Synthetic
MRIRVGIDVGTNSVGCCALVVDEAGTPTKILSCLSLIHDSGIGEDGQKTASSRREQSGVARRARRLLRQRRKRLRQLDALLEKRGYPIVDPSAQKDPYLVWRVRAQLAQETLPEESRRYALSMALRHIARHRGWRNPYANVQSLLLPAPESEFMKAMRQRIMEKTGEILDESITPGQAMTETALTTTIPMRGPNGVLGKLHQTDNANEIRRICEKQGISGEECKELLLAVFASKSPRGSSLGRVASDPLPGQGGLKRAPKCDPEFQRFRIISIVANLRVTEQETGSRPLSPDERERVVNFLLESTSEDIAWADIAGLLGIRRQNLRGTATTTADGERASAQPPTDVTNRIMSGCSVKALRAWWKKADADRRSAMIGYLYEGAEDSECADFLGSLTEKEQGKLDSLHLPAGRAAYSHDSLARLSERMLQTDDDLHAARMHVFGVDDAWRPPVEAIGAPVGNPSVDRTVKTVARFLKAVDNVWEHPESIQIEHVRDGFASEKTARELDRENNRRFKQNQDTVTEIQKVYGVQGEVHRSDVMRYTTVTQQDCTCVYCGITITYLTCQLDHIIPQAGIGSNNHRENLVAVCEPCNRSKSNLPFAVWAEKCNAPGVSVEEAVARVRKWRNIQPGRAQATRLKKLQKDVIARLRRTDEDPAIDTRSMESVAWMANELHQRVKSAYPSAKVAVYRGSITAGARRAAGIDSRVDLLGERGRKDRLDRRHHAVDAAVIAMMSPGIAKTLAERSNLRWSEWLSGKVETWKSFTGATPGARENFEAWRQHMLRLTELLNLAIAEDRIHVTENLRLRLGSGNAHDETVRPLILHRLGEGFTSAQVDRASSPALWCALTREPDFDFKTGLPASENRVIRVHGKRLNADDTVSFFSKKSGDDSKERPFEAISVRGGFAEVGSTIHHARIYRINSTKPIYAMLRVFTQDLLPHRHSDLFSAPLPPQSISVRCAEPKMKAALSTGTANYLGWVVTGDELEVPMEGFTTGQIGEFHKEFPTITRWRIRGFFDKTRLRLRPALLASEGLRDASDPVRKTLSIPGWLISVNGICSTHPTVVRRDSLGRARNSTNSGLPTSWTIE

SEQ ID NO: 8718 - protein, 1085 aa, synthetic construct
  REGION 1..1085: note = Synthetic
MADLLPYVVGIDVGTHSIGAVAIEVDEKNNPISILNAVVHIHDSGVDPDKRKTAESRLKTAGVARRTRRLTRRRRRRLQQLDALLEHLGYPFPDLAERPDPHTPWKVRARLVRETIADEHERKTAISIALRHIARHRGWRNPYSRVESLLHPAEDSQQLLDLKERVKEIKPELDLAAATSAEVITSVDMYNVKFRGPEGMLGGKLMQSDNANEIRRICEMQGVPDDEARRLIQAVFKAESPRGSSAERIGFDALPGQTHMHRAAKAHPSFQLFRMLSILTNLRIREGKGQTRRLSVDELQLAVGHLTTLKPKVVPIWADVAEVLGIERSQLVGTATPTVDGERAAARPPVDETSRRMQAHAPKSVKAWWVEASDEEQAGFIEQVTDGIPSETPAVRDFFDSLDDDDLVALDSLTLTGGRAAYSVNSLDRLSERMLHTGEDLHEARKSVFGVDDDWAPPVPSIGEPVGNPAVDRVLRQIARWLLAVEKRWGEPKSINIEHVRDGFSSEAVSRELDRQYNKRREINERYANDLKERLNLSGPVTRSDIIRYSAVERQNSACAYCGREISFFNVELDHIVPRRGLGSTNRRDNLVAVCERCNRSKKNIPFVTWAAKADIPGVSLEEAISRVKFWVFPPGQMNAQQISSFKREVIARLKQRDFDPPLDGRSMESVAWMANELHGRVKAHFAGASVRVFRGSITAAARKASGLERQIRFFGERGKTRLDRRHHAFDAACVAMMRPKVAEILTIRSNLRESQRLSRETETWKNYSGADAAEQFIYANWLEQMQAMGDLFNDALDKDQVVVRENLRLRLANGAAHDATIRKLQRKFLGEEFSVNEIDKAATPALWCALTRHPDFDNKNGLVANPDRVIRVNGTTLRAGDDVELFAQNSASIKVRGGSAEVGNSIHHARVYRIDKGSRAPAYGMVRVFQQDLLAHRHDDLFTTELKPQSLSFRYADATVKRAISEGRATYLGWIVVGDEIRLDASQVAAGKIAEFMKEYPTIRSWRLDGFFSNSKLRLRPILLAAEGLSENASEASKAIIDRPGWVPAVNVVFGQLGAQIVRRTTLGELRTREVSGMPISWSV

SEQ ID NO: 8719 - protein, 1612 aa, synthetic construct
  REGION 1..1612: note = Synthetic
MKTVLGLDIGTNSIGAALIQLPETLQDYGTNGNIKWIGSRIIPVDGEYLQKFESGAQAETKAALRRMKRSSRRLKHRYKLRRSRLISVLKILEWVKNDFPLDNPKQIKNIIRENNGKFQFKISNYLPFSKETIDEATELLGVKGKKNEKGNIIIPEDYIVYYLRKKALTQKITVHEFARILYMMNQRRGFKSSRKDLKETSILSYTDFQKKKEDIDAGKYPEYKEGNGEEHKTQFVSITRIKSITQEGKEKDKKGKFTFRVETEDSRVKPWFVKREKKPEWEGKEYRFIVEQKINKKGEIKQDSDPKMPKPDDWNLLMVALDNQIDESGKQVGEFFWDKLVEFSKKKEVYKIRQNVIRREKYQKELRAIWDKQIELRKKEGTEEELLNSKKIPLIASELYNHNHVKQNELKERGLYHILANDIIYYQRDLKSQKNLISECRYEKHVGKEKNSNGEFVTTGIYGLKCAPKSSPEFQEFRIWQDIHNLRILEREKIIDNIKKVDVDVTQEWIDETTKEKLYELFDNETEITEKKIFDLINSIKPEAKLTDETYRINLFTNRKSLKGNETKSLFRKIFKQTSYSTEGEKLLQNKDSLYRLWHIIYSISSSDITKSTKGIRTALKSFNLPNNVVDAFTRIEEIKKEYAAYSSKAIKKLLTVMRCGKYWNWQEIEQTEIKTPESPIDKPEKIKLSERIDKIIDDGWERDIKVDKRTGEIINERQFKKREQFSGLPVWLAGYIVYGRHSERESNKKFTQEEIKRLDITNLVPHNSLRNPIVEQVVRETLAVVKDVCNEYGQPDEIHIEIGRDLKKNAEQRQAIAENNTKNLEEKLRAKKLLQELLNGAFEHYDEYGGKIKAPFSVKPNPNSPIDIEKFRIYQSLARFEFDKKENKSENQVQLDALFREGKKERVPSSAEVKKYILWLSQKCISPYTGKIIPLSKLFDEAYYEIEHIIPRSRMKYDATDNLVISETGVNKAKGNELAANFIAKCNGKCEYGGIQYELLTYEAYTKHCENTFRRSNYKKYKNLMATEVPKDFIERQINDTRYIGKKLGELLFPFAKDKEGIVFTIGSITSELKANWGLNKIWKQLLKPRFERLETLTGNKYMFQNEKDQTDIVFDVPEVRDFDAKRLDHRHHALDALVIAATTREHIRYLNSLSAADTDDELKKVKRALVKKKIREFELPWKSFTHDAKEKLSELVVTFKSNNRIITKPFNRYWKWIETKDGIFEKQTVIQSPNKRWLAVRKSMFKEPQGIVWIKEKRKVPIKEAFQIQIERMQVEHDKEKRKTASYVYDQIARPIIKEIINKTSEIAGIPLTKTNELLAAIEKNYLKKNEKKTSSGKCYSLEGKEYEKIEIAEFVMYKAKRVPLDSSFNHKKIDKIPYSATSRIPTLLHNHLREYEKRGLGSSEAFSNEGLELLAKKNNNMPITTVTILDGELKDEHFDNLFGNKYMESDAGSIAYFIIYENETTKERTDMYSLSTHKAIERIIQGKPIAEEREGYKTIILSPNDLVYVPTENEWNRIKAGEKNVIDWSNTKAISERIYKMVKCTGKQCYFIPANISKLIIPYDSDNKIGEIESQNCSENTIFDEEKISIKQNCIKLTVDRLGNITPML

SEQ ID NO: 8720 - protein, 924 aa, synthetic construct
  REGION 1..924: note = Synthetic
LDTADHILERLRTVNFSENKIQNVSDEAIPKQILKSFIKKKSYEELIKGLNTYQAAYLLYGRHSEKEEIRCDSPKEYGKVVLKMLKPGELRNPLVESVMRETCSLVKEVWDKYGRIDEIHVELGRELKNNSKQRELISKAQKNNFDEKLKAKKILTELLNETAFEHYDEEGNKIISGFTVKPNPDNPKDIERFRLWKDQASVNEQDWNGKVKSEKIPTEQQLKKYILWLNQNCRSPYTGKIIPLSKLFDGNEYEIEHIIPRSKMKNDAMSNLIIAERIVNKAKGNELAANFISASNGYCSYEGKDIKIFTYDEYKHFVDDTFKNNRAKRKNLLATEVPDDFIERQINDTRYIGKKLGELLRPVLAEPNNMIFTVGSITSELKDNWGLNDVWKRLLKPRFERLEKILGQKLIYEYEDEYGNKKFGFKLSVNEKLEKNGIKRLDHRHHALDAIVIAATTREHIRYLNTLNASDTNEEIRKYRLTLCKRKIRDFKPPWNNFARDVKDSLESCVISFKENTPIVTKPYNKYEKWEIKNGKPVKIKEKQIKDGNGRWLAVRKSMFKEPQGIIWIKEKRNVPVLEAFKVQIERMKVERDPEKRRLAGYVYDRLARGLIKNIIDKIGGDIEDSDRLLTEVKKYLKKNSKKVDTGKIKKNGKNEYKTVYILDNYEFENIEIAEFVEYAAKRVSLDKSFTHDKINKIPYAKEGKSPLADLLHEHLSRYNDNATEAFSGEGLEALTKKAGKRIEKVTIHEKKSPDDKFGNKYVEVDKGAIAYFIIYENETTKERPEKYSLATHKAIERLIEGKSIAEIKEGFKTIILSPNDLVYVPTEEEQKKIKTNHPSPIDWDNKKEISERIYRMVSSSKSVCQFIQHRIANAIIPSNPKEKIKGEIDWHDKSPKTMDGKFNIADCCIKIQVDRLGNIKPLM

SEQ ID NO: 8721 - protein, 1618 aa, synthetic construct
  REGION 1..1618: note = Synthetic
METKKILGLDIGTNSIGAALIKMPISINDFGKEGEILWLGSRIVPFDTEYTKAYEDGQNGSPQVKTPAANRRLKRGSRRLKHRYKLRRSRLIKVLKLIGWLPNDFPLDNPQQIKNIIRENNGRFDFRVNPWLPFSTETINEATEQLGVKGKTNEKGRPIIPEDWIVYYLRKKALTKKITVKELARILLMMNQRRGFKSSRKDLQDNQILSYVEFENLKARIDSGELQEYKRGEGQERKTRYVSNTIIEKVELKSDEKDKKNKLTFIIKAADPIIIPWEVKRKEKPEWTGKEVKLLVEQKINRKGEIKQESDPKQPKEDDWTLMMTALDNQIDDSGKFVGEFFWDKLVENAQRNEIYKIRQNVIRREKYQKELEAIWERQVELRRVDGTLEELLHGDKLETIALALYRNNAAKQKELIDKGLYHTLANDIIYYQRDLKSQKGSISECRYEKRIGIERSENGEYQKTGIYGLKCAPKSSPLFQEFRIWQDIHNIRILQKEQTTNGTTKIDVDVTRCFLNENNKDSLFDLFDSQAEITEKRLFDKLNELNPEIHLNEEQFRINLFTSRKSLKGNETKDEFRKVFKKFNWEEKGNSILKNPEQFFGLWHILYSISSSDFEKSKKGIKSALKKHFSEMPDEIVEALSGQKEFKKDYASYSSKALKKLLTVMRCGKYWKWDAIENCQIKTPESPIEHPNKIKLSDRIDNIIKNGWERDIKVDKRTGEIIEQRKFTERRQFSGLPVWLAGYVVYGRHSERENSEKYTAAQIQQLNVLQLIEPNSLRNPLVEQVVREAVLMVKDICNTFGQPDEIHIELGRELKKNAEQRAAIAESNSKNLEEKNRAKKLLSELLNDSFEHYDEQGNKVSKNFSVKPNPNNPVDIEKFRLYKSCAHFEYDLKEKKLDDQVWMDNMFRDGKKERVPTNAEVKKYILWLSQKCRSPYTGKIIPLSKLFDENSYEKEHIIPQSRMKYDAMDNLVIAEAGVNKAKGNKLAAIFILEANGSCEHGGIKYPLLTYDEFATHCKKTFRGKKYKNLMATEVPDDFIERQINDTRYIGRKLGELLYPFTTSKRIASEKEANDIVFTIGSITSELKGKWGLNKIWKKLIESRFRRLEKLNGKTYVYPNQKDANDIDFNVPEIPDFDNKRIDHRHHALDALIIAATTREHIRYFNTLNAADTSEEWKNFQRTLCKRKIREFNSPWPTFVKDAREKLSEVIVTFKANRRVVSKPFNRYIKWVKRQDGIIEKQTLRQQSNKNWLSVRRSMFKEPQGIILIKQKRAVKVEDAIRTQIEWMQVEHDEERRRTAPYVYDQTVRPIMKEIIEKTIESTGIPLSNTDKLLKAIKNYYLKKNKQDNAYRIGNQLYEKITIAEFVRYKAKRVKLDNSFDERKISKIPYADKSRIPLLLQQHLNESGSKDEAFSPDGLEKLSQKNQNKPIRKVTIMDGELKEELRDNLFGNKYIETDAGANAYFVIYENEKTKERSVMYSIATHKIVERIKLNLPVAVAQEGNKVILLQPNDLVYVPTNEEWEKLINGEQNVIDWSNRKEITQRIYRVVKSTGKQCFFIPANISKLILPYKNYDGDKKFGEFESQNCSENTIDGAIQIKQRCIKLRILDRLGNIKPA

SEQ ID NO: 8722 - protein, 1172 aa, synthetic construct
  REGION 1..1172: note = Synthetic
LKSQKNSVGECQYEKHKGIDGEIYGVKCSPKSSPEFQEFRIWQDIHNIRILEKEQCVNGITKIDVDVTKQIISEEAKEKLYELFDNSKEVTEQKIFNVLNSLIPEKKLSTDTYKINLFANRKELLGNETKEVFRKILKKYNYEVEGEKLLSDKSIFKRLWHINYSINSSDSDKSTGGILSALGWNNEGTKKWKKEGEKNFNWNLFNLPKEIAEAFAKLPELKKQYASYSTKAINKLLPLMRCGKHWSWDVLHNETKDRIEKIINEGWDFAYDKRTGELIKEREFANEKQFSGLPIWMACYVAYGRHSERANDKKYTTEELKDLDVMKLIPNNSLRNPIVEQVVRETMFLVKDICNKFGQPDEIHIELGRELKKNAKEKENASKNVAKNFEEKQRIKKLLYELMNGDFEHYDENGEIINRSFEAKPNPENPTDIEKFRIYKSCGTVTSDEENTNWETMFKDGKKERIPTNTEIRKYALWLSQKCCSPYTRKIISLSKLFTEEYEVEHIIPRKKLKNDSFENLVICERGVNKLKDNDLAMVFISKHNGSELSYEGKKYKLQTIDDYTSHCKKTFKGRKLKNLLATDVPEDFIERQINDTRYITRKISELLYPVAKDKSGLVFTIGSITSDLKNEWGLNTVWKEILKPRFERLEKITDQRMIIKDQEDDNKFHFHIPQNPELELKRIDHRHHTLDAVIIAATSREHIRYLNSLNAVDNNAELQKVKRALVKGKIRDYKLPWEDFTKDAKEKLNETIVTFKSNNKVVSKPFNKYIKWVQNGDSSWEKKECYQESNKKWMAVRKSMFKEPQGIIWLKEKKKVPVLEAFRVQIERMKVENDSEKRRTTSYVYNQYARSIIKNIIENIGIDLEDTENLLTAIKKYLKKNSKKIETGIIKKNGKPENKTVYMLDDYQFEKIEIAEFVEYAAKRVKLDNSFTHDKIDKIPYQFANEGKINIAKLLHQHLEEYEKDENKKVSEAFIGEGLETLAKKVGQRIDKVTIYEKKSAEDKFGKKYVEVDKGAIAYFIIYEDEQTKERPEMYSLATHKVIERLVQDKPIADKKEGFKTIIISPNDLVYVPTEEEWNKIKTGEENVIDWRNKKKIAERIYKMVSSSKGVCQFVQHQISNAIIPSKPKDKIKGEIDWHDKSPKTLDGQTIISDCCIKIIVDRLGNIKSAL

SEQ ID NO: 8723 - protein, 1688 aa, synthetic construct
  REGION 1..1688: note = Synthetic
MEFKKVLGLDIGTNSIGCALLSLPKSIQDYGKGGRLEWLTSRVIPLDADYMKAFIDGKNGLPQVITPAGKRRQKRGSRRLKHRYKLRRSRLIRVFKTLNWLPEDFPLDNPKRIKETISTEGKFSFRISDYVPISDESYREFYREFGYPENEIEQVIEEINFRRKTKGKNKNPMIKLLPEDWVVYYLRKKALIKPTTKEELIRIIYLFNQRRGFKSSRKDLTETAILDYDEFAKRLAEKEKYSAENYETKFVSITKVKEVVELKTDGRKGKKRFKVILEDSRIEPYEIERKEKPDWEGKEYTFLVTQKLEKGKFKQNKPDLPKEEDWALCTTALDNRMGSKHPGEFFFDELLKAFKEKRGYKIRQYPVNRWRYKKELEFIWTKQCQLNPELNNLNINKEILRKLATVLYPSQSKFFGPKIKEFENSDVLHIISEDIIYYQRDLKSQKSLISECRYEKRKGIDGEIYGLKCIPKSSPLYQEFRIWQDIHNIKVIRKESEVNGKKKINIDETQLYINENIKEKLFELFNSKDSLSEKDILELISLNIINSGIKISKKEEETTHRINLFANRKELKGNETKSRYRKVFKKLGFDGEYILNHPSKLNRLWHSDYSNDYADKEKTEKSILSSLGWKNRNGKWEKSKNYDVFNLPLEVAKAIANLPPLKKEYGSYSALAIRKMLVVMRDGKYWQHPDQIAKDQENTSLMLFDKNLIQLTNNQRKVLNKYLLTLAEVQKRSTLIKQKLNEIEHNPYKLELVSDQDLEKQVLKSFLEKKNESDYLKGLKTYQAGYLIYGKHSEKDVPIVNSPDELGEYIRKKLPNNSLRNPIVEQVIRETIFIVRDVWKSFGIIDEIHIELGRELKNNSEERKKTSESQEKNFQEKERARKLLKELLNSSNFEHYDENGNKIFSSFTVNPNPDSPLDIEKFRIWKNQSGLTDEELNKKLKDEKIPTEIEVKKYILWLTQKCRSPYTGKIIPLSKLFDSNVYEIEHIIPRSKMKNDSTNNLVICELGVNKAKGDRLAANFISESNGKCKFGEVEYTLLKYGDYLQYCKDTFKYQKAKYKNLLATEPPEDFIERQINDTRYIGRKLAELLTPVVKDSKNIIFTIGSITSELKITWGLNGVWKDILRPRFKRLESIINKKLIFQDEDDPNKYHFDLSINPQLDKEGLKRLDHRHHALDATIIAATTREHVRYLNSLNAADNDEEKREYFLSLCNHKIRDFKLPWENFTSEVKSKLLSCVVSYKESKPILSDPFNKYLKWEYKNGKWQKVFAIQIKNDRWKAVRRSMFKEPIGTVWIKKIKEVSLKEAIKIQAIWEEVKNDPVRKKKEKYIYDDYAQKVIAKIVQELGLSSSMRKQDDEKLNKFINEAKVSAGVNKNLNTTNKTIYNLEGRFYEKIKVAEYVLYKAKRMPLNKKEYIEKLSLQKMFNDLPNFILEKSILDNYPEILKELESDNKYIIEPHKKNNPVNRLLLEHILEYHNNPKEAFSTEGLEKLNKKAINKIGKPIKYITRLDGDINEEEIFRGAVFETDKGSNVYFVMYENNQTKDREFLKPNPSISVLKAIEHKNKIDFFAPNRLGFSRIILSPGDLVYVPTNDQYVLIKDNSSNETIINWDDNEFISNRIYQVKKFTGNSCYFLKNDIASLILSYSASNGVGEFGSQNISEYSVDDPPIRIKDVCIKIRVDRLGNVRPL

SEQ ID NO: 8724 - protein, 1721 aa, synthetic construct
  REGION 1..1721: note = Synthetic
MENKMKKILGLDIGTNSIGAALINIPKEFSDYGKEGNIAWIGSRIIPTDGDYLQKFESGAQAETKAAFRRSKRGARRLKHRYKLRRTRLIKVFKALGWLDENFPLDDSKQFNKNINENGYSLKISDYLPFSGETISEFEKELGIDGKKSKKGKSIVPEDWIIYYLRKKALTTKITIHELVRVIYMLNQRRGFKSSRKDLKTTNVLPYNEFIEKNNKKEWGEEGIETQFVVITKIKSVTFKEEKKDKKGYVVSNTYAIEAEDQRMKTWEESRKEKPKWADDKDDNNKEIEKKEFTFLVTHKVDKDGKLTQLKPQLPTNDDWALCTTALSEKMQEGNQHPGEYFYNQIKEAYKANRNFKARQYPVYRWRYKNELDAIWEKQCELNKELNKFNAANATLTKLAEVLYPTQAKNNMPKLSEFQKHDLLHIISDDIIYYQRELKSQKNSISECRYEKRKGIDGEYYGLKCIPRSSPLFQEFRIWQDIHNIRVLEREVKVDGKTKLDVDVTASFVNDEIKEKLFDLFNSRATVNEKRILTLLKENHPNSNIKLDIDKKEKIHSHRINLFARRDELKGNETLSRYRSLFDKAEFDGKEIVNDKEKLMKLWHIDYSITSSDEEKSRKGITTALNKLLPDNSNKEKVIELFTKLSELKKEYGSFSTCAIKKMLPVMRCEKYWNEQDITPTIKERATQIKQRLDDINHSIKRISEIADDDVQKQVLKSFIEKTDLAKGLNTYQAGYLIYDKHSEKDKAVINSIEEFGKYIQREIPNNSLRNPIVEQVVKETMFLVREIWKKYGEIDEIHIELGRNLKNNSDERDKISKAQDKNFTEKQRIKKLLYELINNGFHQYKEGTEIEDVKFEVTPNPESPADIEKFRIWRSLSKGTEKEFKDLLEKEKKDNKEYIPTTGEIKKYALWLSQHCRSPYTGKIIPLSKLFDINQYEIEHIIPRSKMKNDSFNNLVIAEWGVNKAKDKQLAANFIADSKGKCKYGDTEYKLFTYEEYDVYCKDVFKFQKAKRKNLLATEVPEDFVERQLNDTRYIGRKLSELLAPVAKNENGILFTGGMITSELKNNWGLNRVWKELMQPRFERLEKITGNNYIVHDKDEHNNPVIHFNVKENEKLDLKRIDHRHHALDALIIAATTREHIRYLNTLSAADTDEEIKNFKRTLVKSKIRDFKQPWDGFTKQAKDKLEETIVTFKTSNKIISTPTNRTASWKTESEKQPKKIFKEQKQNAKWMAVRRSMFKEPLGVIQLKETKMVPVKDAFEIEIERQLIDKDLEKRKTASYVYDQYARQIIKELIKRCNSGIDEKDSLINEIEEYLTKNSKKIETGKVNKKGKPQYKTLYQLAEKEYEAIEVAHFIPYKTKRMDLTKKDYVEKLTIEKMKNDFPYFSFINKNYFDSLPNEKQLIITDADLTISPNRKTSAFNLLMLDHILEYNNVPKEAFNAEGLEKLNKKAIENPKIGKEIKSITRLDGTVDIEDMFNGGFYETDKGAMAYFIMYENPKIKKRTDYRSIATHKAIEKIVKGDPIAEDRDGFDKIILSPGDLVYVPTKEEIEGKKEINWINKKEISERVYVMRKSTGKQCYFLKSRISDLIISYDSDSKTGEYGSQNLSEKSDDGIKIIDVCIKLKIDRLGNISKTGSYQTSSTTNNNAVSEPEVSYTKRNWTLKSFNSFEAMEDDQLAYYAAMPPIERLKALKELTLNAFGFKHESEMNAPDRKLKFDE

SEQ ID NO: 8725 - protein, 1466 aa, synthetic construct
  REGION 1..1466: note = Synthetic
MKKKKVLGLDIGTNSIGAALVNLPDKFDDYGNDGSIEWLGSRIIPLDGDYLQKFESGTQAETKAAFRRGKRGARRLKHRYKLRRSRLIKVFKTLGWLDTNFPLDDSKKFKTEINDNGYSLKISDYLPFSKETIDEFEEELGIAGNKSKKGKSIVPEDWIIYYLRKKALTSKITIPELVRIIYMLNQRRGFKSSRKDLKTTNVLPYDEFIERKNKNDFGEDGIETQFVSITKIKSVTFIEVKKDKKGNVTNTYLIEAEDQRLHKWEEIRKKEPDWAREVNDKGEKIEKKEFTFLVTQKIDKNGKFTQNKPQLPKESDWALCTTALSEKIQENNQHPGEYFYEQIKEAYKVGRNFKARQYPVYRWRYEKELKDIWEKQCELNPELQKINSDQSTLIKLAELLYPTQTKYNMPKLAEFKIHDLLHIISKDIIYYQRELKSQKNSISECRYEKRKGIDGETYGLKCIPRSSPLFQEFRIWQDIHNIRVFEREVKIEGKTILDVDVTNAVINDMVKEKLFELFNSKVSITEKDILNTLIENRPETNIKLDIDKKEKIHSHRINLYARRDDLKGNETLARYRSLFKKAEFDGHEMLTDKDKLIKLWHIDYSITSSDEEKSKKGITTALNKLLPDNPNKSKVIELFTKLSELKKEYGSYSACAIKKLLPVMRCGSYWNEQEVSDTTKQLATQIKERLENINHNIRRLNEIADDDVQKQVLKSFIGNEDLTKSLNTYQAGYLIYDKHSEKDKTPINSVEDFGKYIQKAIPNNSLRNPVVEQVVRETMFLVRDVWNKYGEINEIHIELGRNLKNNSDERKKISDTQEGNFKEKQRIKKLLYELINDGFEQHIDKDEANPFTFENENFEWKTQIENTTFEVKPNPESPIDVEKFRIWRNLSKQSEIDWAKKVKDEKIPTEQEIKKYALWLSQNCRSPYTGKIIPLSKLFDNAQYEIEHIIPRALMKNDSFNNLVISEWGVNKAKGKKLAANFIDECKGKCKYGDKEYTLFTYQQYEAHCNEAFKFQKAKRKNLLSHEVPEGFVERQLNDTRHIGRKLAELLAPVAKNENGIIFTGGSITSELKNNWGLNKVWKELMKPRFDRLEEETGNQYVIHDKDEHGNPIIHFNVKENEQLDIKRIDHRHHALDALVIAATTREHIRYLNTLSAADTDEEIKNFKRTLVKGKIRDFKTPWESFTKDTKDKLEETIVTFKTNNKITSTPKNRTAYLKVENGKAKRDYKEQQPNNKWMAVRRSMFKEPLGVIWIKQIKDVSVKEAFAIEIERQISFNDLAKRKTASYIYDKLARQIIKSIIQQCNAGIDEKDVLIKEIESYLLKNSKKVETGKINKKGKPQNKTIYILNGTEYETISVASFVAYKTKRMALTKKDYVEKLTIEKMKNDFPYFSENEKRNSAFNNLFLQHIKEYGNDPKEAFNAEGLEKLNKKAVENSKIGKEIKSVTRLDGTVDLDDMFNGGFYE

SEQ ID NO: 8726 - protein, 1571 aa, synthetic construct
  REGION 1..1571: note = Synthetic
MIMKMKKVLGLDVGTNSVGAALITLPKDYLDYGKEGTIEWMGSRIIPTDGDYLQKFESGAQAETKDAFRRGKRGSRRLKHRYKLRRTRLIKVFKSLGWINEDFPLDDSRKFKRNINENGYSLKISDYLPFSAETIAEFERELAIEGTKSKQGKSIVPEDWLVYYLRKKALEKRITIQELVRIIYVLNQRRGFKSSRKDLKENTTILTYAEFEKIKNNIDASMNDAKEYETQFVSITTVEKISKISAEKDKNGKYKFSVKVADKKVLDFEVQRKTAPEWEGKEFTFLITQKIKKGKLEQLQPKTPTENDWGLCTTALDEKINNYRTPGEYFYEQIKESYKAKRNFKARQYPVYRWRYQRELEAIWKKQCELNPELNKINTDKEVLARLAEILYPTQAKNNMPKLIEFENNDLLHIISNDIIYYQRELKSQKNSISECRYEKRKGIDGELYGLKCIPRSSPLFQEFRIWQDIHNIRILKKEEKIDGKIKLDIDVSKQCITDKVNEKLFELFNSKASVSEKEILTLIKECHEQNDIVIAKKDGEHSHRINLFRNRDTLKGNETLARYNSLFRKAGYDGTSILNDNDKLLRLWHIDYSITSSDEKLAEKWISSALSKLLPDIDNKNLAIEMFCKLPELKKEYGSFSACAIKKLLPVMRSGKYWNEDGLNSATKDRIEKIVHGEFDENIDNDTRKKIRKWELENRSLEKIEDFHGLPTWFAGYVVYGIHSEREISKINSVEDFSRFIQKAIPNNSLRNPIVEQVVREAMLLVRDVWKRYGDIDEIHIELGRNLKNNSDERKKIADAQKENFDEKQRIKNLLYELMNDGFDQYNIDEKIEHVNFEVNPNPESPADIDKFRIWRSLTNKTDIDWAKKVKEEKIPTEKEIKKYALWLSQNCRSPYTGKLIPLSKLFDINQYEIEHVIPRARMKNDSFNNLVISEWGVNKAKGKQLAANFIGSSNGKCKYGDQEYSLFSYQEYESYCKETFKFQRGKLKNLLATEVPDDFVERQLNDTRYIGRKLTELLAPVAKGENGIIFTGGSITAELRNNWGLNRIWKEIILPRFERLEEITGKKGEYIIHDHDEFGNPVIHFNVKENQKLNTKRIDHRHHALDALIIAATTREHIRYLNTLNAADTTEELSAIKRSLVKGKIRDFKLPWEHFTLHAKNKLEEIIVSFKTNNKIISQPKNKTAYFKKTEGKIKKEYKWQHSNPKWMAVRKSMFKEPQGIIHLKEVYEEKNILKAIEIQIDRMLVQNKPEMRITPYVYDQEARRIIKDLIERIGIPIQEKQTLMKEVKKHLSKNPLKDISGKDFESIKVAIFEEYAAKRVSLDKSFDHKKIDKIPYSKTGKSVLGRLLHEHLDSAEYKNDKGNADPSLAFSTEGLEVLAKKAGRPITKVTIYEKKDESSKFGKQYVEVDAGSNALFVMYENKITKERTDFRSIATHKAIEKIVKGDEIAEDKEGFEKTILSPGDLVYVPTKEEYETLKEGTKIENAIPWGNKKNALNRIYKVVSFSGKDLLCIKAEISDYIIPYNRKEKNKGEIGWDNKSATTMEGDVTIKDVCIKIKVNRIGILSIS

SEQ ID NO: 8727 - protein, 1661 aa, synthetic construct
  REGION 1..1661: note = Synthetic
MYIKFFNMKKVLGLDIGTNSIGAALISIPEKFEDYGKEGKIEWIGSRIIPIDGDYLQKFESGAQAETKAGFRRGKRGSRRLKHRYKLRRTRLIKLLKLLGWIDGNFPLDESRKFKQNINENGYSLKISSYLPFSEQTISGFEKELGIENRKSKKGKSIVPEDWIVYYLRKEALKRKITDAELVRILYVLNQRRGFKSSRKDLKDTIILPYDVFVTRKDNNDFDENGIETQFVAITKIKSITFKEEKKDQKGNIVGNIYTIKAEDSRIQTWEEIRKKEPDWAKETNEKGEKIDKKEFTFLVIQKIDKNGKHTQNKPQMPKANDWALCTTALSEKIEENKQYPGEYFFDELKKAYKGNRSYKIRQYPVYRWRYQKELEAIWNKQCEFNDDLKRLNTDKNVLIKLAEILYPTQAKNNMPKLTEFRNKDLLHIISNDIIYYQRELKSQKNSIGECRYEKRKGIDGEFYGLKCIPRSSPLFQEFRIWQDIHNIKVLKREEKVDGKTKLDVDVTDLYVDDDIKGNFFDLFQSKTTISEKEILNLIKQLKPENDILISDKKDGVHSHRINLFANRESLKGNETLSRYRSIFKKAGFESETILNDKNNLMKLWHIDYSITSSDEAKSKKGITTALANLLPDNSNKNQTIEAFCKLAELKKEYGSYSACAIEKLLPLMRCGKYWHSIEEQIIYKEGQLEKATKQKHKREIEEYLKYLKSINLRANQIKERLNYINNNIRRLKEVSDDELQKQVLKSFISKDDLTKGLNTYQAGYLIYDKHSEKEKSSIYTVDELSKYIQKEIPNNSLRNPVVEQVVRETMFLVRDVWNKYGDIDEIHIELGRNLKNNNTEKEKISKSQTDSFNEKQRIKNLLYELKNNGIEQYNDDNEIEQANFEVNPNPESPVDIDKFRIWRNLTNKSEIDWVKKVKDEQIPTDQEIKKYALWLSQNCRSPYTGKVIPLSKLFDINQYEIEHVIPRSKMKNDSFNNLVICEWGVNKAKNKRLAANFISESKGKCKYGDVEYSLFTYEQYEDYCKDTFKFQKGKLKTLLLTEVPEDFIERQLNDTRYIGRKLSELLAPVAKNENKIIFTVGTITSELKNNWGLNKVWKQIILPRFERLEQITDKKGEYVIYDKDEHGNPIIHLNVKENPKLNTKRIDHRHHALDALIIAATTREHIRYLNTLNAANTDEEIKKIKQTLVKGKIRDFKLPWERFTENAKNKLEELVVSFKTNNKIVSQPKNKTAYFKLENGKIRKEFKEQKANPKWMSVRRSMFKEPQGIIYLKEVYEEKNIAKAIEIQIDRMLVQNTPEMKTAPYVYDKEARKIIKDLIDRTDIAIQEKEILLKELKKYLKKNPLKNFAGEEYKTIQVAQFEEYAAKRVTLDDSFDHKKIDKIPFAKVGKSVLGKLLHEHLTEYELFTVQLKLIEEKQKVLKKQNPNLSNDEIKKMLTNDEKNILDNPIPEPFRGEGIENLAKKTGKPITKVTIYEKKESSSKFGNQYVEIDAGSNVYFVMYEDQQTKERSDFRSIATHKAIEKIVKGEPIAEDKDGFDKIILVPGDLVYIPTNEERQKIVKGVGIDKSIDWKNQLHISERIYKMTDTTQGKCIFVPHRISSAIIDELEMGSSNKSARAWDGKVEYRLNSKGKLTREDSGSMIKEVCIKLKVDRLGSYKA

SEQ ID NO: 8728 - protein, 1129 aa, synthetic construct
  REGION 1..1129: note = Synthetic
VNDKEKLMKLWHIDYSITSSDEEKSRKGITTALNKLLPDNSNKEKVIELFTKLSELKKEYGSNSACAIKKFLPVMRCGKYWNEQDITPTIKERATQIKQRLDDINHSIKRISEIADDDVQKQVLKSFIEKTDLAKGLNTYQAGYLIYDKHSEKDKAVINSIEEFGKYIQREIPNNSLRNPIVEQVVKETMFLVREIWKKYGEIDEIHIELGRNLKNNSDERDKISKAQDKNFTEKQRIKKLLYELINNGFHQYKEGTEIEDVKFEVTPNPESPADIEKFRIWRSLSKGTEKEFKDLLEKEKKDNKEYIPTTGEIKKYALWLSQHCRSPYTGKIIPLSKLFDINQYEIEHIIPRSKMKNDSFNNLVIAEWGVNKAKDKQLAANFIADSKGKCKYGDTEYKLFTYEEYDVYCKDVFKFQKAKRKNLLATEVPEDFVERQLNDTRYIGRKLSELLAPVAKNENGILFTGGMITSELKNNWGLNKVWKELMQPRFERLETITENKYIVHDKDEHGNPVIHFNVKENEKLDLKRIDHRHHALDALIIAATTREHIRYLNTLSAADTDEEIKNFKRTLVKSKIRDFKQPWDGFTKQAKDKLEETIVTFKTSNKIISTPTNRTASWKTESEKQPKKIFKEQKQNAKWMAVRRSMFKEPLGVIQLKETKMVPVKDAFEIEIERQLIDKDLEKRKTASYVYDQYARQIIKELIKRCNSGIDEKDSLINEIEEYLTKNSKKIETGKVNKKGKPQYKTLYQLAEKEYEAIEVAHFIPYKTKRMDLTKKDYVEKLTIEKMKNDFPYFSFINKNYFDSLPNEKQLIITDADLTISPNRKTSAFNLLMLDHILEYNNVPKEAFNAEGLEKLNKKAIENPKIGKEIKSITRLDGTVDIEDMFNGGFYETDKGAMAYFIMYENPKIKKRTDYRSIATHKAIEKIVKGDPIAEDRDGFDKIILSPGDLVYVPTKEEIEGKKEINWINKKEISERVYVMRKSTGKQCYFLKSRISDLIISYDSDSKTGEYGSQNLSEKSDDGIKIIDVCIKLKIDRLGNISKTGSYQTSSTTNNNAVSEPEVSYTKRNWTLKSFNSFEAMEDDQLAYYAAMPPIERLKALKELTLNAFGFKHESEMNAPDRKLKFDE

SEQ ID NO: 8729 - protein, 1742 aa, synthetic construct
  REGION 1..1742: note = Synthetic
MIPPCSWTLLNVFTKKKIAPVEYKGKNLLRQASLRNKILIVICFATKIEKEIDMEKKRKKVLGLDIGTNSIGAALIDLPQDFAEYGSDGKIEWMGSRIIPTDGDYLQKFESGAQALTKAAFRREKRGSRRLKHRYKLRRTRLIKVFKALGWLDEYFSLDNSRRFKQSVSENGYSFKISNYLPFSDETITEFEKELSIVGKKSKKGKSIVPEDWIIYFLRKKALTKRITIPELARIIYMLNQRRGFKSSRKDLKTTNVLPYGEFVKRKGKNEFGEEGLETQFVVITKIKSVTFKEEKKDKNGSSNIYTIVAENTRLEPWEETRKKEPDWAKEINDKGEKIERKEFTFLVTQKVDKSGKFIQNKPQLPKNDDWALCTTALSEKIEEKHLYPGEYFYEQIKEAYLAKRNFKARQYPVYRWRYQKELEAIWNRQCELNPELQKLNTDQATLIKLADLLYPTQAKHNMPKLSEFKSNNLLHIISKDIIYYQRELKSQKSSISECRYEKRIGKEKNEEGVYIETGVYGLKCIPRSSPLFQEFRIWQDIHNIRVLEREVIVDGKTNLDVDVTGNFISDDIKAKLFELFNSKASISEKDILKLLKENHPDSNIKLDIDKKEKTHSHRINLYARREELKGNETLSRYRILFKKTDFDGDDILSDKEKLRKLWHIDYSITSSDEEKSKKGITTALNKILPDNPNKDKGIELFTKLSELKKEYGSYSACAIKKMLSVMRCGKKYWHEQEINETIKQRAVDIKKRLDNIGQNVRRINEIADDDVQKQILKSFIGKEDLTKGLNTYQAGYLIYDKHSEKDKTSINSAEDFGRFIQKEIPNNSLRNPIVEQVVREAMFLVRDIWKQYGKIDEIHIELGRNLKNNSQEREKISKAQDGNFKEKQRIRQLLYELMNGDFEQHIDEDETQPYKFENGMFKWGTKIEHTTFKVKPNPESPADIEKFRIWRNLSKQSDMEWAKKVKDEKIPTEQEIKKYALWLSQNCRSPYTGKIIPISKLFDENEYQKEHIIPQSKMKNDSFNNLVISEAAINPPPYKGSMLARNFISQFGGQTLTINNREYPILKETEYEAYCKDTFKFQKGKLKNLLATEVPENFIGRQLNDTRYIGRKLSELLAPVAKNENGIIFTGGAITSELKNNWGLNKVWKDLMEPRFERLSKLTPEYIEEKRKLDEEFAIKDSQGQPRKDKNGDIVVQDDRKVEYEQKVRAIPLKYIIHDKGEYGNPVIHFNVKENEQLDLKRIDHRHHALDALIIAATTREHIRYLNTLSAADTDEEFKNFKRTLVKGKIRDFKTPWERFTKDAKDKLEETIVTFKTNNKIISAPKNRTAYLRVENGKAKREYREQQPNKKWMAVRRSMFKEPLGVIWIKQIKDVSVKEAFTIEIERQLSYNDLTKRKTASYIYDKLARQIIKSIIQQCNSSIDEKDALIKEIEFYLTKNGKKIETGKVNKNGKTQYKTIYVLNGTEFEEVSVANFVAYKTKRMALTKKDYVEKLTIEKMKNDFPYFSENEKRNNAFNNLFLQHIKEYNNDPKEAFNAEGIEKLNTKAIENPKIGKEIKSVTRLDGTVDLDDMFNGGFYETDKGAMAYFVIYENQQTKVRDGFESIATHKAIEKIVNGDSIAKDREGYDKIILSPGDLVYVPTAEERKKVEQGVSIENVIPFNNNAILSKRVYKIVSFSKKDLLCIKANISDYIIPYDRKAKSKGEIGWDNKSGNTLDDDTAIKDVCIKLKVDRLGNISKA

SEQ ID NO: 8730 - protein, 1704 aa, synthetic construct
  REGION 1..1704: note = Synthetic
MKKILGLDLGTNSIGAAILSFPEKFEDYGKEGKIEWLTSRIVPFDEDYSKAFLEGKNGSPKVKTPAANRRQLRGSRRLKYRYKLRRTKLIKLFKLLGWLPEDFPLDNPKRIKDIIAEYGKFNFRISDYVPVSDESYREFYKYFGYSEEQLNEIIEEIKFRRIHNGNKRNEEIKLLPEDWIVYYLRKKGLTQKLTTEELIRILYLFNQRRGFQSNRLDLKENETTIVNYEEFKEKFKELRRNENGKMIAKVKEKYKNQNFETKFVSITRVINIEELTEEGEKAEKKFRIYLEDNRIEAYEIERKEKPDWLNKEYTFVVTQKIEKNKFKQNIPKTPEENEWIYCTTALDEKMGNKYPGEYFFDELVNAHIEKREYKIRQYPVYRHRYQKELETIWKKQCELNPELAQLNINQDILKKLAEVFYPSQSKFNGPKIKEFLNNDLLHVISNDIIYYQRDLKSQKNSIGECRYEKRKGIDGETYGLKCIPKSSPLFQEFRIWQDIHNIRLIRKEHINPDGKKILDIEETSLYINDELKEKLFDLFNSKEEIKEKDILLVINQYHKDIKPIQIGKKDEEHSHYINLFRTRKTLKGNETKHRYRKIFKELDFNGDYILNNNDLLMKLWHADYSNSNTDEKKSFKGILSALGWKSENEKNKNWNVFQLSFEDAESIAELIVKLPAFKKEYGSYSALAIRKMLIFMRTGEYWKHPQDIINQIQNEIKNGTVNKDTKEKEKFLQSLENALDKADKTYERLKSINFDERKIQDVDDDEIPKQLLKSFIKKRSYEEFIKGLNTYQAGYLLYGKHSEQEIIQVNSPEEYSAYIQKTLKPGSLRNPIVELVVRETCALVKDVWKKFGQIDEIHIELARELKHNKEERARISEIQNENLEEKQRIKEILYELLNYESFEHYDENGSRIISGFTIKPNPENLEDIKRFRLWKEQASLSDKEWDKKIKEEKIPTQEQIKKYILWLGQNCRSPYTGKIIPISKLFDGNEYEVDHIIPRSKMKNDAMNNLVIVESRVNKAKGNELAANFIANRNGYCEYEGKKIDLLKYEDYKKLVDDIFRNNRAKRKNLLATEVPDDFIERQINDTRYISKKLGEVLRPVLKDPYAVIFTIGSITSELRNNWSLNEIWKDLLKPRFERLEKILDKQLIIKETNSNKFYFDLSFNEKLEKDGIKRLDHRHHALDAIVIAATTREHIRYLNTLNAADSDEEIKKYHLTLCKGKIRDFKLPWENFVKDVKDALQSCIISYKESKPIVTKPYNKYEKWVIENGKAIKKIFKQEIDGGGKWMAVRRSMFKQPLGIIWLKQIKAVEIKDALKIQAQWNEIKNDPQLKKNKPYVYDDYAQKYLDAVVEQLNLSPKNFTKKKNEIDKWIESISEKVNTGITDKNGKTKTKTLYNLDGKIYEKIEIAEFVQYKTKRMKISPENLKSYSIEKMIKNIPYFEFISEEQFNEFNEEQQEIIKNAGINIGNKKMSPINFVLLLHIVKYRNNPKEAFNNEGIENLNELAIQKIGKSIKCITRLDGEVNNQEIFRNAIYETDKGANIYFIMYENIKSKQREYLSPSPSISVLKAIEKKNKMKDIAPEKEGFKRIVLSPGDLVYVPTIDEIEEIKKNNTSIEDLLKNKAMKDINERIYQVRKFTGDACYFIKYNIAELILSYSEVDNKKIGELGSQNLSEYTMDDDEIPIKKHCIKIKINRLGEIQIIY

SEQ ID NO: 8731 - protein, 1308 aa, synthetic construct
  REGION 1..1308: note = Synthetic
MPKTLGLDLGTNSIGWAIVNTDFPEKILDKGVHIFSEGVKIEKGVESSRAAERTAYRSARKLIARRRQRKQQTLKVLADHNMCPLKPAEVRIWVMDKKQYPKKPEFIEWLRTDEAEGINPYALRDKASRGKIGQMELGRALYHLAQRRGFKSNRLDQTDEDELGPVKESKKRLSEKISDAKCNTMGQYFHSVYLKNQSGSIGNNLENIRKVWIPDREEHYLAEFEVICEVQKLDERLRDQLRSAIFYQRPLKSQKHQIGRCTLEPDKLRCSVSHPDFEEFRARQFINSIKKQDENGKFKQLNEEERENLWPKFTRLSKPTFEFKDLMKEITPGGQEVRFNYKPYEVISGCPFHALIENLFGADWKQTITGRYQRSTKKDGSIKSPEEIIHDIWHVLFSFDDKDKVKAFGSDKLGLGVKQQDKLADFRPKREYGRLSLKAIRKILPHLRNGHIFSYAVFMANLPEGLEDKQQREIGQQLSHILDTHRSHTKEVEIVNRLIGRFREDGLASHGAYQLDTQDKKEVVAVIHEVIGEAVLEGWPVEKQQELISDIEASFEKQLRLQPQGKFVQPQRLDERIKTYLSEVGLTDNQLDKLYHPSIIDPFEAPKVDPKDGKRYLASPAIPSIKNPMAMRTLYQLRHLINALIREGKLDENYTVNIELTRQLKDANERAAIRRYQQELRREREAHRNEIIKLFKTEHGKNIEPSVDELLKYKLWEEQGHQCIYTGLTINVSDFVGGVPIFDIEHTLPFSLSQDNSQANKTLAHQAYNRKVKGQKLPVECPNYNEEKTLSLEGKAVSCPPITRVFEKWQKTLDELEKQYNRRKLPPRGRLETKLQKDRRLQDKHYFRLKRDYWREKIARFKMTEVKTGFKNSQLVDTGFITRHARAYLNMYFDKVYSIKGDVTAAFRVHWGLQKEGEPKERDYHTHHAEDAITLACITKDLYDRLARATRYEEEGNPREGRKHIAATKPWPTFTEDVKAIRQEVLISHHTPDQTHKQTRRKLRKRGKLVRDSKGQKIYARGDTARGSLHKDTYYGAISDSEGEVRYVVRRAIATLKPGDIANIVDPVIREIIEKEVAAKGFKEAIDAGFSMASGVPVKKVRCYAKTVTDPIHLKPHTFVRSVKPRLPHKEEYHVVNDENFALAVYAGEDARGKKHRQYEVVNMMEAAEYYKLSNQLSQDQPLIPGATTVGKKQEVILPYQYMIKKGTMVLFYQNELEELLHLSSRELNRRLYKVTKFDKEGRVFFRFHTEARQASTLKPAYAIDLQDPPPLVRLPSKSVDKFKIAVEGVHFDLHITGRIKWRPIMDR

SEQ ID NO: 8732 - protein, 1219 aa, synthetic construct
  REGION 1..1219: note = Synthetic
MKKRILGLDIGIGSVGWAFAELNEVYFEADEQADLGENRLKIKGGKISGMGVRTFQQPIDRNSKSLALIRGNDRRTRSTLERRSERLKYFVKLSKRYVLISNDFSASSFELQKDSVAADTDVWTLRKQGLYRLLTDFEFFRVLYHIAKHRGFYFPTKAERNLLSKDKGKIDLSEDKEDKIIKGALKKIISDFGVSGSMTIGEYFINTYPFPENKSAEWKMHRKHNKKDVYELSIPRELLLDETQKIFERQRRFGNTKASAELEEEYVKKVLMYDYLSDPENQERYTKKLHKMMGKCEFFPNEECCPKESFSSEIFSFYNRLNALKLYVSSDEKPYKFSFCNRAGMKAEDIVLKEIDRKDIFDLVLSKSKVSFADLRIAMKLDMNMRFNLCSYREKNPEYTRFVTVKRQNDGLATIADDLELYRNDTGETEGDCKEAFLQKVQKLFDKYPKMKEKRYSFSDVRNMVGLEQDLRFVFLKSHYVKQPAEMKNGLKDYLKQFEKETFFEMKGYHKIKTKFGEKFEEINTPEKIDLIAEALTKYKTDDLRKLFLDGEGFSVEQINKILELNMNGLSGFSFKALKILNPLLEKGLRFDEAKEESGLKKMQLNKQGYIPEYKGFFENNPTVARIIGQVRKVVNAVIRKYGVPDEIHIEVATDVANSKKKKALISDGQKRYKDAKERAKERCEEFGLDPYDGANLLRFRLAEEQDFKCPYTGLGIVGIPDEKNLYIKDCEIDHIIPFSRSFNDSLANKVLCAPKANQEKKNRLPFEWLNGAGNSEEWQIFKARLKTMRFSYQKRKNLLCEHFDEKDKEGYITRNLNDTRYACRHIAEYLRDNFDFSLSERKDIKDTHRVRVLGGGITASLRHMWGLDKIRGENSRHHALDAAVIACTTFGHVYYICNIKKKCEFAGKNFFKNSKIEMRPWASISEDIKKGISEIFVSRMCRHSATGEGHDGLDKKDGKYPINRSGNNKGLAKSLGNMFRFDVFKDEEGRYSVIPVYSIDLHGYKYPKTDADGNVMRDGQGSAISATKEEILRETEKNRKFVFSLYKDDYVKIWVKSETTPTEGYIVQYGGETSGQFVLKAADDSYAYQTRSTTVSNGDRILLDGKIWEIASFDPAEGCLEIRHDHMVKKLSATAKINKKGELSAKFKTEQTNTKLSKEKTVKYTEIVDLKKYQVDPLGNRIEVKSEKRLAVNSLKSNRQRRADRYRLDFHRQRLGKS

SEQ ID NO: 8733 - protein, 1031 aa, synthetic construct
  REGION 1..1031: note = Synthetic
MLIPNDSLVLGLDIGSSSVGWSLIQNRGEAVEIVASGVRVFPWTVDEQTLMSRSVERRRARQRRRQLERRARRRRLVASLLQRQGFLPPGPPDHRDPSWKAVLAMDPYELRGRALETRLEPWEFGRVMYHLAHRRGFAGSGRGADDSETGVIQEQIEKTAREMQKVNARTLGEFLAQLDPRERRRRGWHTAREWYRTEFEAIVQAQQRMGLNLDPDWVKRLRRAIFFQRPLRTSPRAVGRCGLVPGRLRAAWGLLEAQRFRYLQKLNDLRVLLPDGQVRPLTPQERELVRGELERSERLTFDRLRRLLSSCDPSEALGEPSTGKAGNCDEDPGARSTSDFSRQKAGLAFNLECGGQDCLPGNTTAARIRSAIGQKWDQASEDVRRAMVELLLGVKDRKLRARLALRRKEWALSDLEAERLAQVNLEPGRCRFSSAALRRLVPHLEAGCALTEAIAREFPEHEARFRTEADPPPETPVTNPLVRRALAETRRVVNAIVRTWGLPGRIHIELARELRKPLRRLRELLRRNEERQRQRKHAIKYLIEKGIQDPRPDQIEKFLLWVECKQICPYTGQSISDVDLFGPLPRFDVEHIIPWSRCLDDSFANKTLCEVDHNRNRKRNRMPTEVYSQDELSQILRRVRAFQGPYRFEKLRRFQMTEADLTTETGWLLRGDQLQATAHAARLAGRLLGRWYPAEERLSRIQITNGAVTSWLRVAWGLNQLLGVADEKNRSDHRHHLVDATVIALTTAATVKALTEAARRSARPRRFVDMPVPPGLVDSLRQQLETVIVSHRVDRRVQGPLHEETFYGRIQTPPTGESRTVVRKRIDALSATEAQRIVDPRVRELVAQVCNGRAPKEVFRDPSLIPEVPFGSRKVRIRHVRIWVSENPISLKDGDPRLVLPGSNHHLEIFDCREGPRPGWRCVVVSRWEAMRRLRAGKPVVRRFDEHGCPLVCSLARGETVRLNLPGGPVIAVVQKLSQDDYNFRLHTDGRRAADIPASERIRIRSSKALKKCLGCKLVVDVLGRCHVSRD

SEQ ID NO: 8734 - protein, 1081 aa, synthetic construct
  REGION 1..1081: note = Synthetic
MQRHLAALIHYGKTYLQRRAQSSWDRRKEFPMQETSRSLVLGLDIGSSSVGWALVRCDEQGRAQVVDGGVRVFPWAIEEDTLKSRNLERRAARQRRRQLERRARRRWKVARLLHRYGFLPPWPSDARIHGFHRDPQWGPLLAKDPYELRAKALDQRLEPWEFGRVMFHLAHRRGFSGLCAARDDEELTQIRKEIGQLEEEMKQTGARTLGEYLARLDPRERRRRARHTSRDWYRDEFEMIVDRQRELGLPLTDDMIKSLRRAIFHQRPLKVVPSAIGKCPLVKGRRRAPWGLLEAQEFRYLQTLNNLRVTLPNGVQRPLTPQERERVIQRLETVEELTFNALRKLLFGDQCKRVRSGHGREFQRLPSLLPLIAGQDTSETAPRDSVSVTAEGAEEWQPGWDLDSVRFNLQEGGRDCIEGNVTATRIRKAIGTKWDQATPEVRRAIVELLLGVEHTNVRKNVALRRTAWGLDEAEAERLSEVTLEGGRCRFSSTALRRLLPHLRQGLSLYEAIQREFPEHGEAAALDRVPPLGEEITNPLVRRALSETRRIVNAILKTYGKPDQIHIELARDLRRPLKAVRDMIWQMRERERERKEAAEKLREFGISEPTSRDIEKYLLWKECNARCPYTGLQIAMEQLFGPHPRFDIEHIIPWSRCLDDSFANKTLCEVEHNRQRKRNRMPTEAYDADELQAILARVREFTGPFAKQKLDRFQLTVPPELELVHRGDQLHATAHAARVAAQQLARLYPQEERTRRILVSSGRATAWLRVAWELNRLLGLADEKNRADHRHHLIDAVVVALTTPAIVKQLTEAAKRSLRPRTFVDMPVPEGLVDSLKERLEQVVVSHRVERKVQGQLHEETFYGLIRSPETGEVKAVVRKPIDSLSLNEAENIVDRRIREIVLEACEGKAPKDVFKDPTRIPMVRFGNREVRLRRVRIYVEGDPVELRPGDPRRAFSGSNHHVEVFNCHRGWRCEVVSRWEAMRRLRLGERVVRRQDEHGCPLVCSLARGDLVRLNWKGTTLIAVVQKFSERDYVFRAHNDGRMDKDIKQDRIRITSDRGLQKALIQKLSVDVLGRYHVSRE

SEQ ID NO: 8735 - protein, 1383 aa, synthetic construct
  SITE 1144: note = misc_feature - Xaa can be any naturally occurring amino acid
  SITE 1027: note = misc_feature - Xaa can be any naturally occurring amino acid
  SITE 1188: note = misc_feature - Xaa can be any naturally occurring amino acid
  SITE 985: note = misc_feature - Xaa can be any naturally occurring amino acid
  SITE 1284: note = misc_feature - Xaa can be any naturally occurring amino acid
  SITE 1057: note = misc_feature - Xaa can be any naturally occurring amino acid
  SITE 633: note = misc_feature - Xaa can be any naturally occurring amino acid
  SITE 1243: note = misc_feature - Xaa can be any naturally occurring amino acid
  REGION 690..691: note = misc_feature - Xaa can be any naturally occurring amino acid
  SITE 1184: note = misc_feature - Xaa can be any naturally occurring amino acid
  REGION 680..687: note = misc_feature - Xaa can be any naturally occurring amino acid
  SITE 568: note = misc_feature - Xaa can be any naturally occurring amino acid
  SITE 978: note = misc_feature - Xaa can be any naturally occurring amino acid
  SITE 960: note = misc_feature - Xaa can be any naturally occurring amino acid
  REGION 608..609: note = misc_feature - Xaa can be any naturally occurring amino acid
  SITE 1289: note = misc_feature - Xaa can be any naturally occurring amino acid
  SITE 624: note = misc_feature - Xaa can be any naturally occurring amino acid
  REGION 575..576: note = misc_feature - Xaa can be any naturally occurring amino acid
  SITE 456: note = misc_feature - Xaa can be any naturally occurring amino acid
  SITE 1271: note = misc_feature - Xaa can be any naturally occurring amino acid
  SITE 1297: note = misc_feature - Xaa can be any naturally occurring amino acid
  SITE 1303: note = misc_feature - Xaa can be any naturally occurring amino acid
  SITE 627: note = misc_feature - Xaa can be any naturally occurring amino acid
  SITE 902: note = misc_feature - Xaa can be any naturally occurring amino acid
  REGION 1..1383: note = Synthetic
  SITE 739: note = misc_feature - Xaa can be any naturally occurring amino acid
  SITE 1133: note = misc_feature - Xaa can be any naturally occurring amino acid
  REGION 1167..1170: note = misc_feature - Xaa can be any naturally occurring amino acid
  SITE 742: note = misc_feature - Xaa can be any naturally occurring amino acid
  SITE 571: note = misc_feature - Xaa can be any naturally occurring amino acid
  SITE 809: note = misc_feature - Xaa can be any naturally occurring amino acid
  REGION 1265..1266: note = misc_feature - Xaa can be any naturally occurring amino acid
  SITE 836: note = misc_feature - Xaa can be any naturally occurring amino acid
  SITE 1209: note = misc_feature - Xaa can be any naturally occurring amino acid
  SITE 540: note = misc_feature - Xaa can be any naturally occurring amino acid
  SITE 694: note = misc_feature - Xaa can be any naturally occurring amino acid
  REGION 1315..1316: note = misc_feature - Xaa can be any naturally occurring amino acid
  SITE 728: note = misc_feature - Xaa can be any naturally occurring amino acid
  SITE 1106: note = misc_feature - Xaa can be any naturally occurring amino acid
  SITE 726: note = misc_feature - Xaa can be any naturally occurring amino acid
  SITE 416: note = misc_feature - Xaa can be any naturally occurring amino acid
  REGION 675..677: note = misc_feature - Xaa can be any naturally occurring amino acid
  SITE 1204: note = misc_feature - Xaa can be any naturally occurring amino acid
  SITE 1224: note = misc_feature - Xaa can be any naturally occurring amino acid
  SITE 929: note = misc_feature - Xaa can be any naturally occurring amino acid
  SITE 991: note = misc_feature - Xaa can be any naturally occurring amino acid
  SITE 1103: note = misc_feature - Xaa can be any naturally occurring amino acid
  SITE 605: note = misc_feature - Xaa can be any naturally occurring amino acid
  SITE 844: note = misc_feature - Xaa can be any naturally occurring amino acid
  SITE 1178: note = misc_feature - Xaa can be any naturally occurring amino acid
  SITE 497: note = misc_feature - Xaa can be any naturally occurring amino acid
  REGION 612..613: note = misc_feature - Xaa can be any naturally occurring amino acid
  SITE 822: note = misc_feature - Xaa can be any naturally occurring amino acid
  SITE 781: note = misc_feature - Xaa can be any naturally occurring amino acid
  SITE 1040: note = misc_feature - Xaa can be any naturally occurring amino acid
  SITE 918: note = misc_feature - Xaa can be any naturally occurring amino acid
  SITE 897: note = misc_feature - Xaa can be any naturally occurring amino acid
  SITE 872: note = misc_feature - Xaa can be any naturally occurring amino acid
MKTILGLDLGPASIGWASVLEDEIYLFNSDILAAGVCRCPLTDNESTEFGKGDKITTNSNRTAKRGARRNNFRFKLRREKLRQLLIDYGIITHDTIIAENGADSTYNLLRLRSLAASERIELADFGRVLMMLNKKRGYKSNRKTDPTDTGDDAIDSIDIALELQKRNITPGQYALELMERGANRLPQFFKSDLKKELKQIFENQQQYYPQLTSELLDSIDEKNESKTWGIISKVLNIVGVKRIIGRGRDKKIEELQWRVASLTRQVDAEVLAQVISKINGAITAASGNLSAMSERSKNLFVSKKTIGEYKFDVLSDNPHYCFKDITFYRKDYEEEFEKIWETQARFHKELTPELKKLVRDKTIFYQRPLKSQKHTVAFCELESVQKTVENDGKTITVQSGPRVAPKASPIFQQFRXLEKLCNLKINGKPLSIEMLDKLADNLEFCDKMSAKEILLXLGQNPKTDKLNYKEILGNRTASTILNACVDILEMSGYDMEXLLEGLIPAEKARKVADMLAGEGIDSSILYFDPTLSGDEIERQXAYRLWHTIYSAEDAKNEKLIHTIASLLXIEXEQAXXFAYLRFEPDYGSLSSKAIKKILPFLKEGXPYXXACXXAGYKEPEPILXDHXDPLPKXSLRSPVVEKILNQMIRVVNELMAIYGRFDEIRIELAREIKKXXXERXXXXXXXXKRXXDNXRIVEILKAEPFKIKHPSDNDILRYRLYMELEXNXFKTLYSNTYIXKEXLFSGDFQREHIIPKALAFDNSFSNQTLETSGVNDEKGKXTAIDYVISKGEISVDDYLNKIDTLEKKXAISHTKAKNLRCXAEDIPSDFLNRDLXLTQYITRXAREILEQVTPNVTVTIGSITARLREDWXLIDLMKELNWDKYDRLGLTEQYKNXHGKTXKKIKNWTKRNDNRHHXLDAITIAFTRXEFIKYLGNLNAQSDKDGEIYAIRTKFLKKDXDHKGNPKFKSPMPEGKIXQRVKEVXESMLIXVKDKNKVVTSNFVKTKSKSRKDKTIEENKKKKEIKXYLTPRLQLHDETXYGRNLRYDTSEVKVGAXLTAETIGKVASKAYREALLRRLEEFGGDSKKAFTGKNSLAKNPIYXDEXHTSSVPEKVKIVELKPIYTKRTEINKXLNIANVLDTGXKKILEERLEQYGGDKAKAFSNLXXXXIYLNREKXITIKKXTVKXSRVSNPIAIHKAKDHXGNELXAEDGSAIPVDYVAPXGNYQAAFYETPEGKVEEIXVTNFEAVRRAIQNPPLPIIDRXXNSDKXWKFLMSLKKNEYXVFPAXKTSESGKXEIKTFXPKEIDLLNPANXXLISPNLFRVQGLSKRYYEFSHHLETTSKETKELLGITYKRITSTNRLKDIVKVRIDALGRIVAVGEE

SEQ ID NO: 8736 - protein, 1381 aa, synthetic construct
  SITE 1007: note = misc_feature - Xaa can be any naturally occurring amino acid
  REGION 1268..1269: note = misc_feature - Xaa can be any naturally occurring amino acid
  SITE 1204: note = misc_feature - Xaa can be any naturally occurring amino acid
  SITE 1344: note = misc_feature - Xaa can be any naturally occurring amino acid
  SITE 1001: note = misc_feature - Xaa can be any naturally occurring amino acid
  SITE 1273: note = misc_feature - Xaa can be any naturally occurring amino acid
  SITE 1305: note = misc_feature - Xaa can be any naturally occurring amino acid
  SITE 1176: note = misc_feature - Xaa can be any naturally occurring amino acid
  SITE 1021: note = misc_feature - Xaa can be any naturally occurring amino acid
  SITE 1332: note = misc_feature - Xaa can be any naturally occurring amino acid
  SITE 1074: note = misc_feature - Xaa can be any naturally occurring amino acid
  SITE 1314: note = misc_feature - Xaa can be any naturally occurring amino acid
  REGION 1373..1374: note = misc_feature - Xaa can be any naturally occurring amino acid
  SITE 1120: note = misc_feature - Xaa can be any naturally occurring amino acid
  SITE 1279: note = misc_feature - Xaa can be any naturally occurring amino acid
  REGION 1357..1358: note = misc_feature - Xaa can be any naturally occurring amino acid
  SITE 1336: note = misc_feature - Xaa can be any naturally occurring amino acid
  REGION 1264..1266: note = misc_feature - Xaa can be any naturally occurring amino acid
  SITE 1013: note = misc_feature - Xaa can be any naturally occurring amino acid
  REGION 1329..1330: note = misc_feature - Xaa can be any naturally occurring amino acid
  SITE 1277: note = misc_feature - Xaa can be any naturally occurring amino acid
  SITE 1342: note = misc_feature - Xaa can be any naturally occurring amino acid
  REGION 1370..1371: note = misc_feature - Xaa can be any naturally occurring amino acid
  REGION 1292..1298: note = misc_feature - Xaa can be any naturally occurring amino acid
  REGION 1346..1351: note = misc_feature - Xaa can be any naturally occurring amino acid
  SITE 1081: note = misc_feature - Xaa can be any naturally occurring amino acid
  SITE 1285: note = misc_feature - Xaa can be any naturally occurring amino acid
  SITE 1079: note = misc_feature - Xaa can be any naturally occurring amino acid
  SITE 1118: note = misc_feature - Xaa can be any naturally occurring amino acid
  REGION 1052..1053: note = misc_feature - Xaa can be any naturally occurring amino acid
  REGION 1282..1283: note = misc_feature - Xaa can be any naturally occurring amino acid
  SITE 1355: note = misc_feature - Xaa can be any naturally occurring amino acid
  SITE 1042: note = misc_feature - Xaa can be any naturally occurring amino acid
  REGION 1..1381: note = Synthetic
MKRILGLDLGTASVGWAVVEEGEIDKFDSNILAAGVRRYPLTVDETKSFSKGDPILTNVDRRLKHGARLNNFRFKLRRENLRQLLIENGIISPETVLAENGPDSTFSLLELRAKAATERISLEDFGRVLMMLNKKRGYRSSRKSNDAQDGDAAIDTMDIAMELQKRNITPGQYALEKMQNGASRVPQFYRSDLENEFHRIVDFQSKFYPQLSPEFVESLKGKNDSQTWKMLSTVLDIKGTKRASGRGREKKIEELTWRVMALNERVDAEVLAHILGKINGSIASASGLLSAMSDRSKELFINNVTIGQYKYRKLSENPHFSFRNISFYRQDYLAEFDTIWETQAKYHKELTPELKKEVRDCCIFYQRPLKSQKDKVATCELESYQKEVEVDGKKKKVFIGPKVAPKSSPLFQQFRIYQIVNNIKINGNPLSEEQQIMLCQNLEFCSKLSDKEILTLLGLKPKDAKLNFKEILGNRTATAILSACEEFLALNGYDTDLLDGLNPAERAMKVAHKVEEYGLNAAYLYFNAQDNDIERQPAYRLWHTLYSAEADDSRSGNETLKRTLSKLLDIPIEQTAPFVSVAFEPDYGSLSVKAIKKIMPYLADGLVYSDACEKAGYNHSKRSETREQKEMRVYDSHIDILPKNSLRSPVVEKILNQMIRIVNELMEIYGQFDEIRVEMARELKKSAKERKSMTDSINSRAKENERIVNILKNAPFNIANPSSNDIVRYRLYEELEFNGYKTLYSDTYIPKEELFGKGFNIEHIIPQSVAFDDSYSNKTIETTTVNLAKGNQTAIDYIEATLGASAMNDYLQKIEVLEKKGVISHTKAKNLKCKAEDIPSEFLNRDLSMSQYIAKKAVEILENVTPRVTPTIGLITDCLREDWGLIDVMKEMNWDKYDRLGLTTQFTNRDGKVVKRIVDWTKRNDNRHHALDAITIAFTRPVFIQYLNNLNAQSDKGSEIYGIKKKYLYRDEHGTLSFLPPMPADQMRKRVRETLESILVXTKAKNXVVTANXDKIKTGHXDVKKKYLTPRMQLHNETVYGXSLRYETQMVXXGGNMDMEMIKKVATKSYREAXEKRLXEXGGDAKKAFTGKNALAKNPIYIDLAHTQCVPDKVMIVXLXPCFTQKVAITENLDIAKVLDSGIRRILEQRLEQFGGDKKKAFSNLEENPIYLNKDXGITIKKVKIKARISDPIAIHDAHDHLGXLIYQADGTTIPSDYVAPAGNHHVALFETPTGAVEEVMVSNFEAVTRAIAVPPMPVIDRNXXXDXXWKFXMTLXRXEYXXFXEYHLDEXXXXXXXIFDPKDXDLLNPDNYXLISPHLYRVQKLSSXXYXFRHXLETTVXEXKXXXXXXYKRXTXXKLMKDVVKVRVXXLXXIVHVGEY

SEQ ID NO: 8737 - protein, 1379 aa, synthetic construct
  REGION 1..1379: note = Synthetic
MKQILGLDLGHTSIGWSVVKENENPAETSYILGAGVRRVPLSVDETKNFTEGKSITTNAERRQKHSARLNNHRYKLRRRALKDVLLELGFINENTVFAETGPNSTHSAIALRAKAATEEITLEELGKVLMMLNKKRGYKSTRKLNEDVGNGYIDALGIATMLKTRNITPGEYSLELYENGKKSIPEFYKSDLLEELERICSVQHSFNPLIPENIASIIKGKNESQTWAILASALNLKGVKRSPSRGLDKKIEECRWRVTALTSPVELEQFATIVSKLNAAASSTSGFLSDLSERSKELLLYSETIGQYKMRILSGNPHYSFKNISFYRQDYAAEFNTIWNTQAKFHPELTDEIKAKIKDTIIFYQRPLKSQKSKVAYCELESGTMLANGDGKMRLVKAGPKVAPISSPFFQQFRIWQTLNNLRIDNQPLSLEEKQKLADNLEFCDKLSAKEICNILLLKGKNNKLNFKEIEGNHTSAAILRACEKIAEISGHSLDGISTYPSLRAKAIAEIIEALGINKDILYFNPLLPDDEMETHPAYRIWHLLYSAEADDSRSGNEKLKKTLCRLFNFNNDTVVPISAITFYSDYASVSVRAIRKLLPYLMQGKMYSEACEAAGLNHSKRSLDREAIDSKVYADHLDCVKKSSLRSPVVEKILNQMINVVNALIEQFGTFDEIRVELARELKKSAKERETMTKDIKGREKENAAICNILQSAPFNIAHPTRNDIIRYRLYKELEPNGYKTLYSNSYIPKEELFTNKFNVEHIIPKSLLFDDSFANKTIETAQANLDKGNMTAYDYVLTTYGEAGIERYNATIDELVKKGVLSKKKEKNLKCPAGEIPSNFLNRDLALTQYISRKAIELLEEISPKVTATTGAVTDKLRQDWGLVDVMKELNWDKYNKLGLTSSYTDHNGNTIKQINDWTKRNDNRHHAMDAITIAFTRPEYINYLNNLNARSDKSGLIYSIQQKYMHRDKNGNLKFTPPMPADKMRAEVKDKLSSVLVSTKAKNKVVTANTATTKSSTGEKKNKYLTPRTQLHNETIYSRSFYYKTSEAKVDGRMNAEMVAKVASRLYRDALEARLKQFNGDAKKAFTGKNSLKNNPLFTDGSHTQQVPEKVKIVEIEPRYTVRVAVSEDLNLEKVIDKRVKRILEERVAQYGGNKKEAFANLDTNPIYLNKEKGIVIKKVKIDAGVKNVVALHDAHNHLGNKLITPDGSPVPADFVATSGNHHVALFLTPEGKVEEVVVSYFEAVARAISKPQIPVIDRDFNSEEGWQFLMTLKKNEYFVFPGYENSESGAQVMTFNPKEIDLLDPANFARISPYLFRAQKLSSHYYVFRHHLETNVEDTKALAGISWKRLCTPALMMEAVKVRVDHLGKIVKVGE

SEQ ID NO: 8738 - protein, 1668 aa, synthetic construct
  REGION 1..1668: note = Synthetic
MKWRLALDLGTNSIGWAALKLNHEDSESRVSEIIDMGVRIFSDSRRAKDGTPLNEERRMCRQMRRQKERRIRRKRAMRTFCVAHGLLPSDPEERKKIAQLNPYQLRTEALERPLAPHELGRILMQLAGRRGFKSSRKESVNTDSEVTGMKAGVERLSKILGEKTLGQWLYEQQAKGKPVRFRAKHEGAKIIYDLYPSREMYEKEFSAIRAKQAPLFPDLNWDRAHWIIFFQRPLKRPERGKCQFYTNEDRAYKAQPSAHRFRIAQDVMNLCYYDENNRRIEISQEGKQRLLRELDQVKNLSFKKIRQLLDLSATIQFNLESERRDKLRGNDISVDFRKDTYFGEQWDRLSWEEQDEIIEQLITEEDEHKLKELLHEYNLSETNIATILGYQFPTGTTMLSAHFMRDCTRIMHEGLLPYHEAVTALGLHHSEETQPPLHRRLPYYGTILTALVQNAHGAVPPDRQFPNKQAEIEYIYGKIANPTVHVALNQVRKLVNALVDRYGRPHEICMEVARELKLPKYKKQEFEKKQTINQKNNDRARRELQLLRLLVPSKEDIKKYLLWEELGSDSVARACPYCGRPISASQLISNEIEIEHILPYSKTLLNTRDNLTVAHRECNQVKGQRTPYEAFSSNPEGYNWQDIVARAQRLPANKRIKFAPDALQNYLDENQFLQKQLSDNAYISRSTKQYLAAICDKKRIWVSTGRLTAMLRGFWGLNTLLNKDHDTWFKNRFDHRHHALDALTIGLCDRGLINRIARLNSQGKYAQIVVPEFPFERSKVAEKLKKLVVSPKGDHGKEGKIFKETAMGCIKKIRKINPEELEETMINDIIPPAIRGKVQELVKSRTFRAIKSELPQKFTHFYIAEKIWVTTCDVTALSQSDIEEGRVIDPHIRAALREFYEKNKEVCTTNTELAKKLKEFSQIYNILERIANNISNYINDLYYEISSKTSEIFEINKALVLLNKCKDVESLIDKSMKFLKTDLGLNTIDIGECNEILKNCNFCKLKKITVRVDDKDYGFCVDLSDNKEESKKEMVDIFQELFAINMSRIINTLKIRETNLEYVHLSEILMSLLAQKNVNEIFNLILEKAKDICKADASYIGVYDKSTGNIVLKFFMNINTDEFKSLKFNKNQGLGGLVIRERRGIFIQNYFTDHRIDSPFKDIVKKEGIISTIAVPIFYQDEIYGILYVGYRTMKKDITYELSFLQKMSTAAAIAIERENNINELKNKELELRKAYEELVERRKEINELLKGYKDANLELERSNRELVEQYEIVKKSYEELNSLNKAKDLFLGILSHELKTPITIVKGYIETLLSKDFYLDNKVKSALTTALKSVNNLSEKVDDLLDYMRLETKKLKLYFKEISFREIFRDIANELYPFLEERKQKIIIKDSDFKFKGDVKWLKKAFASVINNSIKFSPDGKNIYIDFEVVEREKLIVPYYVKEKPVLSNKYLIISIRDEGVGIPESEINKIFDSFYELGDIRTHSTGKYKFMAKGVGLGLSFTKQIISMHNGIVYAESDGFDVEKCPGTIIKIVLPMDEEKIVEDKKKESILIIDSDYDFSRFLELFLSQKYSVYLFDDGGVGYLKILEIKPKLVMINVSLKNYDGYEVCSIIKEDKNIKDIPVILYGTGPESFDEIRAQKVKANMIFYPIFDTENLLRVVEYYMKR

SEQ ID NO: 8739 - protein, 1021 aa, synthetic construct
  REGION 1..1021: note = Synthetic
MRDYVLGLDLGTASIGWAIIDLELDDDGEIGSEIGLRAAGVRIFPEGVNRGPKGAEKPKNVERRTARGARRNRYRFHQRRRNLARILVAAGLLPESEADRQKLWRLDPYVLRARGLDEDLSAHEFGRALFHLNQRRGFKSNRKSGEANANKGMLKEISDLADAIKESKARTLGEYLNEIAGTDRSCLVRGETHLRKRHTLRAMYQDEFDLLWGRQVKAHPETLTDELRQRVADEIIFFQRPLRLQTHLIGQCEHEPQEKRGPKSHWVSQQYRVLCDVANLMIQQANGHERKLSEHERAQATQLLSANDKRTFKQLHKALGLDPDARFNLEQGGRTSIGGNSAEAALLNGIGEKQWLSLTAEAQAHLRELLTECEDEDEMRSNLAEFELKPDAEIKLIAYAGPDGYGHLSLKAMRNLIPHLEAGLNLHEAKKACDYVQIPVVPVETRLPAPPNIRNPVVQSALVEVRKVVNELIRIHGLPYRIVVELAREMKGSVAEREEKSIEMHKRQVEREEVARKLEEEVGIPVPRRADIEKYRLWEDQEGICPYSGRAISQGQLFSSDIEVDHILPRWRSLDDSYLNKVVAFTQSNREKADRTPREWREGLGDYDGMIERISKMKGMPFSKRRKFTQKEIDLDSFVARQLNDTRYLSVAARDYLGCLFEPEDQASRVRVGRGQLTAELRRRWGLNSLLTPFSVQEGEEPPKYRGDHRHHAIDAIVVALSRPGHLKRLAAYHKQKNRMGTRAPAFEEPWEEFRSSVASVIQLILVSHRPRRRLRGPLHEGFFYGPSETQGEYFYRKSVSELTAAMIPKIRDKAVREAVEARLSEFGWQEGKAIPKGSLDDPENPVRMLKGNVPILRVRIRKQIGDPVEFTREGDQTPFRAAISGNNHHAEFLAHTGAGSNGIARVEVVSMIEGARRARRGHEPIIGRKHPDGLQTAYALSIGDSVLIQHPAASQSLLCVIKNMSPTPRFIDICLRDARDARPAGKSKDLYRIVSLKRWNELNVQKVQVSPCGLVHRSGI

SEQ ID NO: 8740 - protein, 1211 aa, synthetic construct
  REGION 1..1211: note = Synthetic
MENYRQKHRFVLATDLGIGSNGWAIIDLDAHRVEDLGVQIFESGEEGAKKASARASQQRRLKRSAHRLNRRKKQRKEALIKFLQEIEFPDLVEILNSFKKQKNPNDILSLRVKGLDNKLSPLELFSILIYMSNNRGYKDFYDNDINDNNTDKDEKEMEKAKSTIEKLFASNSYRTVGEMIATDPTFIVDKSGSKKVIKYHNKKGYQYLIPRKLLENEMSLILHKQEEFYDCLSIDNITIILDKIFFQRNFEDGPGPKNKRDDYKNNSKGNQFYTGFNEMIGLCPFYPNEKKGTKNSLIYDEYYLINTLSQFFFTDSNGVIMSFSKSLLHDLMLYFFDHKGELTNKELSSFLLKHGLELNSKEKSNKKYRLNYMKQLTDSTIFETEMIASFREEIETSSYRSVNSLSNKIGNCIGQFITPLKRKEELTNILIDTNYPKELASKLADSIKVIKSQSVANISNKYMLEAIHAFESGKKYGDFQAEFNETRELEDHHFMKNNKLIAFQDSDLIRNPVVYRTINQSRKIINAAINKYNIVRINIEVASDVNKSFEQRDNDKKYQNDNYEKNLQLESELTDYINKENLHVNVNSKMMERYKLYLSQNKHCIYTNTPLTMMDVIYSTNVQVDHIIPQSKILDDTLNNKVLVLRDANSIKNNRLPLEAFDEMQINVDTNYTKKDYLTECLHLLKNKTNPISKKKYQYLTLKKLDDETIEGFISRNINDTRYITRYIANYLKTAFKESDKTKNIDVVTIKGAVTSRFRKRWLTTYDEYGYHPTIYSLEDKGRNLYYYHHAIDAIILANIDKRYITLANAYDTIRLIKIDRNLSKEQKQRDIDTVIKNTVKSMSKYHGFSEDYIRSLMSKNHIPAICKNLSDEVQIRIPLKFNTDYDNLGYRFTDDQYHYKKLYIAFKEAQNALKEKETLEKELIERFNNEAQILNANIILTYTGFESNNELIDIKKAKKVTDTLKPNLKNYIKAIDILTQEEYTKRCLEYYNDSEFATQLKIPYVNFKINKRFRGKIQGSENAVSLREVLKKTKLNSFEEFESYLKSEDGIKSPYYIKYTKNTLGKESYTIYEANSYYCAEIYTDSQNKPQLRGIRYVDVRKEDGKLVLLKPLPSTCKHITYLFHNEYIAIYKDSNYKRLKNNGFGAYRSINNVNVNKIIIRLFANQNLNDNDVVITSSIFIKKYSLDVFGHINGEIKCGDQSLFTIKKR

SEQ ID NO: 8741 - protein, 1064 aa, synthetic construct
  REGION 1..1064: note = Synthetic
MENKKIFGFDMGANSIGWCAQIIDKNGITKEILGMGARIFDNSRDPKTRVPLSVERRLAHSASTRRDRQIMRTKHLCSLLRKYGLLPAQSGFSIADRNPYKLRANAVHKKIDLFGIGRAILHINKRRGFKSNRKTDKKSDASEAAGMKAGISKLRQAMGNKTLGEFLYERKKSALPVRMRAEVIKSKNQYEIYAERAMYEDEFRRIWETQQKFHNSLTAEMRDKIFDALFFQRPLRVPERGFCQFEANERRAYKAYPISQKFRILQEVNALEIADIGNQNNRLAREQKERLAKALLENDSKLADKKSFASFSKIKKFLNLPKAATFNFENESSKGFEGDSTARILACDDCFSDSWNELPDDVREKIIDLIIADKEEEFLAFTAEKFGFDPQKAKFILDAGAALKEGTVSLSSKAMRKILPFLEEGELYHSACARAEYNFNANYAGEILDSLPYYGKILRTSVLGGNAKFDPEKEPEKYYGKINNPTVHVALNQLRKVYNKLVEVYGKPDCVAIETARDLPLGEKGLKELISKQGKNRTKNEEIAKELEKLGVANNAKNRMKYKLWEDLSENVERRACPFCGRQVELSKLYTPEFEVEHLLPFSETFDDTRANKVVSCASCNRIFKGKRSPYDAFANRAGFNWEEILSRALELPKNKQWRFKQNAWEIFEEKYGDFIQRMLNDTRYMSKVAREYLTCVLSPQNILTISGGMTAMLRGRWGLNAILDANSESGEAVKNREDHRHHAVDAFVISCANGKLVKKISESAKLAEEAHIENVLKTIPTPYSGISFEKLKGIVEKIRVSHKLDRGDVKGALKKGATIAKLHSDTSYGRIKATESESGKITLAKRVPLSSIECDWDNISQIANPNIRKDLLDYCDEVFANALTEKSKKDMWTKFLSEYQADKKIRRVRIHLPNRELKKLIPVSDKNGRVYKYMENTESYCIDIYKPYGSDKWQFEVINMYAAHKNEIPDWRKNDSRAKLIMRIFKRDTIAYEEDGEYKLAIIKGIEGNGQIVLAPLNQSKVKENSDVKRPIASSLQKLKAHKVYIDEIGRLYDPQKKMNEGV

SEQ ID NO: 8742 - protein, 1061 aa, synthetic construct
  REGION 1..1061: note = Synthetic
MNYRLGFDLGAGSIGWCILELDADSAPCSLVDMGVRIASDGRDPQTKSPLAVSRRMARGMSRNRDRRVMRREALLKALVRFGLMPADKAAAAGVAAGNPYKFRHDGVHEKIELFDLGRAIFHISKRRGFKSNRKTDSRDSESSSMKAGIERLRGILAGRTLGEYLYERLRSNEGTRMRARLIKAKNEYEIYADRKMYEEEFDRLWSVQAGFHPELTDAARDAIRRIVFFQRPLKVPERGKCRFEPSLERAYAAYPISQAFRIWQEVANLEIVSLGGDSPALSREDREKLADELLFNRSKKANKAGLLTFSNIRKILGLKSVEFNLEDGVRKGLYIDRVDAAMSAPEVFGPRWREMPDADREAFVDFLSSHGDGESASWLHEKFGISEEAAENVLDAFQSLPAGTVSLSAAAMRKILPFMKDGALYHNACALAGYAFNSFGSETRLERLPYYGEILKAAAIGADPSADPVKEPELHFGRIANPTVHLMLNQLRRLVNGIIETYGAPAEIIVESARDLPLGEKGLAELKANIAKNRRRNEEIAAELEKCGVENNYENRMKYRVWENMNPDSLERRCPFCGRPVSLHELFTPAFEIEHLLPYSRTFDDGISNKVISCARCNRHKRNRTPFEAFGHNPEGWSWDDICARASLLPKSSQWRFESDAIEKFSENGGDMIARMLNDTRYISKIAREYLSAVADPMKIWAVNGRITSLLRGKWHLNEILNPANLLSGEERGVKNRNDSRHHAIDAFVIACAGHSTIRRISECAKLAEEAGLQKLVSALGDPFPGFSYGDFDRMVSKILVSHKPDRGNARGAVSKNKTLGKLHNETAMGMVGAPDASGNAMFAKRVMLDSIEPREKNVNEIANLKVREDLLKILEEAKKSVSGEPALKRLWLEKLGQYSSANGVRRVRIHVPRAISKVIGIKDKSGKAYKYMDNAENYCIDIYIPSGSEKWNFHIVSMFAAHSAAETPPWRKNDPHAKLVMRLFKNDIVAYEKDGERKIDRVAGIASQGQISFIPVNMAKWDGTNPPRIKPVSLQNLNARKVYIDELGRLFDPGKSRYSE

SEQ ID NO: 8743 - protein, 1074 aa, synthetic construct
  REGION 1..1074: note = Synthetic
MKYRLGLDIGSSSIGWCIFETVNNIPVRIVDMGVRIFTDGRDPQKKTPLAVERRMARGARRQRDRRLQRINALVKQLKSCGLMPESKDAKKLELKNPYKIRAKAVHEEVSLYELGRALFHINRRRGFKSNRKADKGADENESSAMKKAIKDLNEKLGGQTLGEFLYERQNKGENVRVRAETIKNKNIYDMYADRSMYEKEFDRIWNTQSKFHKELTPELRQKIHYIIFNQRPLKVPERGFCQFEKDERREYLAMPISQIYRIYAEVAQLEIIAFEGDDKRLTPSERNAIANELLLNTKKLAKKDGEITFEKISQKILNLPKSTKFNLQSENRKGLFCDKTAFIMSQEECFGADWHKFSFEKQSEIINTILNVSAKPLSDEELEELLSIKYSISKEKAVSILNKAMKLPDGTGSLSALAMSKILPHLKEWNIYNRACALAGYNFNQNYSGEILDKLPYYGQVLKTAALGANPTEENLKFPEKYYGKITNPTVHIALNQVRKVVNKLIDIYGKPDEIVVETARDLPLGEKGISELKKNQEKNKKDNDRIAKELEKVGAKNNYQNRMKFKIWEDLNKDEKQRCCPFCGKQIPLNAIDGLFSRHFEIEHLLPFSETFDDSRNNKVIACKDCNHMYKGKKSPFEAFGHIKDKDNPRNYDAILARAKDFVNAEKRLWRFQEDAMRRFKDEESDLIARTMNDTRYMTRATREYLTSIVEAKNVYTVKGVITGLLRNKWGINKLLNDPALPPEEADEKNRNDNRHHAIDAFILCTISRAMIQRIAQSAKLCEEAGYEKIVSDIGKPFDDFDYEEMKKHLDKMLISFKPDRGNAVNAVKNNKTLGSLHNETALGAINFKDGSKTLTLAKRIKIETLDFKEKNIEEVADEKIKKDLKAIYEEVILAGADKKVWVEKLSKYAKNNSIRRIRIHLRNNELSTLIPIKDKNGKIYKYYANAENYCMDIYLPSGEKKWHFKPVSMFEAHQKNYIPKWRKTDPHAKLVMRLFKQDILAFEENGNIVYKRITSIWGSGVIQLMPLNKNFIDKDDKRTSKTPSSLQKLNARKVYIDEAGRLFDPGKAKYSE

SEQ ID NO: 8744 - protein, 1110 aa, synthetic construct
  REGION 1..1110: note = Synthetic
MDLHRNPYLHNHMYKEFFCYNINNQNKERKNTDMENKKVFGFDMGANSIGWCVQIIGEDGFTLEILGMGSRIFENSRDPKTRVPLSVERRMAHAMSVRRGRQIMRTRNLCSILRKYGLLPSGENVSVSERNPYKLRAKAVSEKVDMFGIGRAILHMNKRRGFKSNRKADKKSDGAESRGMKLGISKLREAMGDRTLGEFLYERKKSGMGTRMRADAIRGKNEYEIYADRGMYESELRRIWDCQRKYHRNLTDEMLNEISGALFFQRPLKSPERGFCRFEPGERRAYKAYPVSQKFRILQEVNALEILDIAGNGEGITLSMRQKLARALLENDRKIVNKKGIATFAKIKKFLGIPQSLNFNFESESRKGFDGDSTAAVMGSAECFGDAWADMDDCLREKIVDLILADKEGEFAALCAEKFGFGAEKSCAILDAGGELKDGTVSLSAKAMRKILPHLEGGALYHAACAEAGYDFTADYDGERSDLLPYYGKILRTSVLGGNPNFDPEKQPEKYYGKINNPTVHVALNQLRKVYNKLVAVYGRPDMVAVETARELPLGAKGLGELLSEQGKNRGKNLEIAEELKKFGAANNYRNRMKYKLWEDLNPDCIKRACPFCGRPIELQKLFTPEFEIEHLLPFSETFDDTRANKVVSCASCNRILKGNRSPYDAFANRAGYDWNGILSRVSDMPKSKQWRFRPDAWEIFEEKYGDYIARMLNDTRYMSKLAREYLTSVIEPEKILTVTGSATSMLRAKWGLDAILDDSSPLQFGGESESSAVKAPKAPVKNREDHRHHAIDAFVISSLNRKLISAISQCAKRAEQAHLENLFKAIPRAYERISYEKLEAAVKSINVSHKLDRGDAKGALKRGGTVAKLHKETAYGMIGSPYGGKATLAKRVPILSVECDEGQISEIANAKIRADLSRFCEQVYREAATKEEKKSMWARLLGEYCASNKIRRVRIHLPNRELKKLIPISDKKGKVYKYMENAESYCIDIYKPRNSEKWKFEVINMFAAHKNEMPQWRKDDSRAKLVMRLFKRDTIAYEENGEYRLAVVAGMATHGQISLLPLNVAKVEGNPPKKTPSVLQKLNARKVYVDEIGRVFDPYKRENERMQSC

SEQ ID NO: 8745 - protein, 720 aa, synthetic construct
  REGION 1..720: note = Synthetic
MDDCLREKIVDLILADKEGEFAALCAEKFGFGAEKSCAILDAGGELKDGTVSLSAKAMRKILPHLEGGALYHAACAEAGYDFTADYDGERSDLLPHYGKILRTSVLGGNPNFDPEKQPEKYYGKINNPTVHVALNQLRKVYNKLVAVYGRPDMVAVETARELPLGAKGLGELLSEQGKNRGKNLEIAEELKKFGAANNYRNRMKYKLWEDLNPDCIKRACPFCGRPIELQKLFTPEFEIEHLLPFSETFDDTRANKVVSCASCNRILKGNRSPYDAFANRAGYDWNGILSRVSDMPKSKQWRFRPDAWEIFEEKYGDYIARMLNDTRYMSKLAREYLTSVIEPEKILTVTGSATSMLRAKWGLDAILDDSSPLQFGGESESSAAKTPKAPVKNREDHRHHAIDAFVISSLNRKLISAISQCAKRAEQAHLENLFKAIPRAYERISYEKLEAAVKSINVSHKLDRGDAKGALKRGGTVAKLHKETAYGMIGSPYGGKATLAKRVPILSVECDEGQISEIANAKIRADLSRFCEQVYREAATKEEKKSMWARLLGEYCASNKIRRVRIHLPNRELKKLIPISDKKGKVYKYMENAESYCIDIYKPRNSEKWKFEVINMFAAHKNEMPQWRKDDSRAKLVMRLFKRDTIAYEENGEYRLAVVAGMATHGQISLLPLNVAKVEGNPPKKTPSVLQKLNARKVYVDEIGRVFDPYKRENERMQSC

SEQ ID NO: 8746 - protein, 971 aa, synthetic construct
  REGION 1..971: note = Synthetic
VFHIYGYFCYNDIFNYLVKLFWGKPVDRINYRLGIDLGTNSLGWCLLKLNEKSIPEKILLAGARIFSDGRDPKSGSSLAEARRLNRGARRRRDRFLGRKGALMQKLVELGLMPKNKYERKKLEVLNPYELRAKAIENSLAPHELGRALYHLNQRRGFLSNRKTTTKEEGQKIKPDIDGLKEALDASPARTLGEYLWLRDKNKQRVRARIDEKLYPTRALYRDEFTQIRSCQLRHQKLTGDEWQALETIIFHQRDLKTPEPGRCQLEPNEYRARAALPSFQKFRIAQDITNLAWIDEKGGKHFLTAEQRKKLWNLLHKQKTVKFGKVRTTLELPEGVQFNLEDEKRKDLKGNVTAKLLSDKKYFGEKWFDFSDKIRDQIVEELLDIEDEKAVIQKAMNTWSVSEEQARNLASLLPEDFPKGYCRFGIAVLQKLVCCMRDDGLRYDEAVKKLGYHHSNNRPDELVEKLDYYGKMLPKAVAFGDPDEASPEKKFGKIGNPTVHVALNQLQKVVNDIVTTHGHPQEIVVELARNLKLSKKRKDDLEKEQRKNQKNNERIEGELKILCLENNGPNRLKYKLWEELSSDPNDRLCPFSGEKITPVNLFSPQIEIEHILPLSKTLDDSQNNKTLATREANHLKHDRGPFKAFGAGDTGYDYGDILDRAHQLPKRKFMRFLPEAMERFDDENQFLARHLNDTRYLSTVATEYLSHICRTVRVIPGVLTAMLRHKLGLNDILGERGIKDRNDHRHHAIDALVTALTDQGLLQRVSQLTGAGLLEPSEELSDPVKPRLKAPEVWAGFHKEAEEKINHIVVSHKPDHGIQGPLHEDTAYGIIQHPSSWEKENGYNVVRRKPSSDLSRNEIGAIRDPDLREKFMNFANTFENDKELKLALPDFAKNLGVLRVRVLKKEHPIIEIIHQSTATKPQSQKRNHKKGLAPGPVHHLEFWQNPDGALHQGVGRVSGSIFSRPIKMIRS

SEQ ID NO: 8747 - protein, 1447 aa, synthetic construct
  REGION 1..1447: note = Synthetic
MKKILGLDLGTTSIGWAVINEAESEKESSGIVRSGVRVVPLSVDEQTDFEKGRPLSTNADRTLKRGMRRNLDRYQDRRAHLFYLLREHGLIKEGTVLTETGKGTTHTLWALRADAATKPILLEDFARVLLAINKKRGYKSNRKAKDEDEGQAIDGMAIAKELYDNDLTCGQYGLQRLNAGKRHIPEFYRSDLKAELNRIWNKQREYHGELLSHVLLEKIAGKNQTTTWAILKEPWGLVGEKRTSKGLDKRVEDYQWRVDALSRKLTLEQLAVVIQQVNGAISTSSGLLGAISDRSKQLMIQDLTVGQFLYNQIKENKHTPLKGQVFYRQDYLDEFERIWEVQKDKHPQLTAELKHDIRDTVIFYQRRLKSQKGQLAVCEFEGKEQPVIDENGKPALTKEGKPKMRKVGPRVCPKASPLFQEFRIWQVLNNIELIYEGKDGTGDERSENGIVRKGRSWCLGSEYKARLYAELSWTKELSASDALKVLKLQPKEWKVNFKKLEGNRTNEKYLEMFGAMLRVTGHDEVDLNKLTAEERAKTIEEILGALGVDTDILHFDATLSGKEFEQQPAYALWHLLYSYESDNSSRTGNERLIKQLVEKFGFNRECAEILCKIHFEDDHGSLSTRAIKRILPHLKDGQIYDVACELAGYNHSHSVTAEENEARELIDALGILPKNSLRNPVVEKILNQMVHVVNKVIKVYGRPDEIRVEMARELKKSAKEREEMTKSIDDATKAHGVIRKEIAQYYPFNTGVRITRNDIIKYKLYQELKENGFKTLYSQTPVVPEELFGKKFDVEHIIPQARLFDDGFSNKTIELRSVNEEKGRMNNATAMDYMEVKYGPESEQVAQYKARVERFFKKASPAKFKKLLMKEADIPDGFIDRDLRNTQYITRMALGLLRQVARTITPTTGSVTDRLRQDWQLINVLQELNWTKYDKAGLTYTEKNKDGDVVNKIKDWTKRNDHRHHAMDAIAVAFTRPSHIQFLNHLNARRDEDHKKHAVIQAIERKETYIDTKGRRLFKPPMPIDELRKEVKQQLESTLVSFKAKNKVTTRNVNKSKTKDGYHRKVELTPRGQLHKETVYGKKQFYTTKLVSVGPSFDQATIAQVARMDYRQALLLRLHALGGGEPKKAFGGKNALSKNPIWVDEHHMEQVPEKVKLVQMTSRFTIRKAISPDMFKDSKKNDDFLNRVEDVHDRAVVNALKAHYERTRLEVEAFNQTVSSVKERKKVLETAFSNLDDNPIWLNREKGIKVNRVTITGVSNAEALHTKHDHNGKAILDKDGREIPSSWVQTGSNHHVAIYRDQEGNLQERVVSFYEAVTRRLQGQSVIDRSLNANQGWVFLYTMKQNEMFVFPDKENDFDPSTTDLKDPSNAWRIARKLYRVQSLARSEYGNNVIRDYQFRHHLESQLVNAKELQNSTYYKIKSLKDLEGIQKVRLDHLGRVVHVGEY

SEQ ID NO: 8748 - protein, 1444 aa, synthetic construct
  REGION 1..1444: note = Synthetic
MKKILGLDLGTTSIGWAVINEAENENEQASIVGTGVRVVPLTVDEQTDFEKGRPLSTNADRTLKRGMRRNLDRYQDRRAHLLQLLKQHGLITEDTVLTETGSNSTHSLWALRADAATKPIALEAFARVLLAINKKRGYKSNRKAKDEDDGQAVDGMTIAKELYDNDLTCGQYGLKRLQDGKRHIPDFYRSDLKAELERIWRKQREYHGELLRHELLEKIAGKAQKATWAILKEPWGLVGEKRTTKGFEQKVEDYQWRVNALSEKMSLEQLAVVVQQVNGAISSSSGLLGAISDRSKQLLIQDITVGQFLYKQLQENPHTRTKGQVFYRQDYLDEFERIWEVQKEAHPQLTDDLKRDVRDTVIFYQRRLKSQKGQLAVCEFEGVKKPVIDENGQPAMTKDGKPKMRKVGPRVCPKASPLFQEFRIWQVLNNVELTYEGKDGSADDRSENGIMRKGKAWCLGPEYKAKLFAELSWTKELTAADALKAIGLKPKEWKVNFKKLEGNRTNQKYMEAFGAMLAVTGHDDVNLEELPAEERASTVEAVLNTLGVDTGILHFDATLAGKEFEQQPAYALWHLLYSYESDNKSRTGNERLIKQLRDKFGFNRECAETLCKISFEDDHGSLSARAIKKILPHLKQGEIYDVACELAGYNHSHSVTADENEARELIDTLEILPKGALRNPVVEKILNQMVHVVNKVIAVYGRPDEIRVEMARELKKSAKEREEMTKSIDAANRAHDTIRKEIAQLHPFSTGVRITRNDIIKYKLYQELSVNSYRTLYSDVEIIKEKLFSKEYDIEHIIPQARLFDDSFSNKTIELRSVNLKKGNATAMDFMETEYGPDSEQVAEYKARAEKFFKKESPGKFKKLLMKEADIPDGFIDRDLRNTQYITRMALGLLRQVARTVTPTTGSVTDRLRQDWQLINVLQELNWDKYEKAGLTYTEKDKDGGDVRKIKDWTKRNDHRHHAMDALAVAFTRPSHIQYLNYLNARRDEDHRKHKVILAIENKETTVDSKKRRLFNPPMPLDQLRAQVKQHLESTLVSFKAKNKVTTRNVNKSKTKNGHFRKVELTPRGQLHKETVYGKKRFYTTTEVKVGPSFGADMIAQVAKASHRQALLLRLHAVGGGDPKKAFGGKNALAKNPLWLDDQHKEQVPEKVKLVQMEEQFTIRKDITPDLFKDSKKKDDFAKRVEDVHDKAVRNALKAHYERTKLEVEAFNETVTNAKEKKKVLETAFSNLAGNPIWLNHAKGIKVNRVTITGVSNAVALHVKRDHHGKSILDADGHEIPSDYVQTGNNHHVAIYRDAEGNLQDEVVSFSVAVERVRQGLSPIDRSFNSNKGWRFEYTLKQNEFFVLPSAETGFDPTVVDLLDGRNAKLISPNLFRVQKFSKLQYGNSFVRQYMFRHHLETTLLDTKELKDVVYKDIKSLGYFHGIRKVRLNHLGQIVHVGEY

SEQ ID NO: 8749 - protein, 1262 aa, synthetic construct
  REGION 1..1262: note = Synthetic
MKKILGLDLGTTSIGWAVINEAENDGEHAEIIRTGVRVVPLSVDEQTDFEKGNPLSTNAERKQKRGIRRNLDRYQERRDHLLGLLREHGLINEQTALAETGKNSTHALWALRAKAATERIELDQFARVLLTINKKRGYKSNRKAKDEDEGQAVDGMSIAKELYDNDLTCGQYGLQRLQAGKRHIPDFYRSDLKEELERIWNKQREFHGELLSHELKEKIAGKAQKATWAILKEPWGLVGEKRTTKGFEQKVENYQWRVDALSRELSLEQLAVVVQQVNGAISSSSGLLGAISDRSKQLMIQDLSVGQFLYAQIQRDPHSRVKGQAFYRQDYLDEFERIWELQKEFHPQLTPELKSKVRDTVIFYQRRLKSQKGLLAVCEFEGTKQPVIDENGQPAMTKDGKPKMRSVGPRVCPKSSPLFQEFRIWQVLNNVELIYEGSEGTGDERSENGIQRKGKAWCLGPAYKAQLYAELSWTKELTANDVLKLLKLKPKEWKINFKKIEGNRTNQKYMDAFKAMLEVSGHDEVDLDAVSAEERLKTVETILGALSVDTDILHFDATLSGKEFEQQPAYALWHLLYSYESDNKSRTGNERLIKQLIEKYGFNRDCAEILCKVHFEEDHGNLSAKAIKKILPHMKEGHIYDVACDMAGYNHSHSVTAEENETRTLIDALEILPKNSLRNPVVEKILNQMAHVVNKVIEVYGRPDEIRVELARELKKSAKERAEMTSSISTATNAHDVIRKEIAKLHPFSTGVRITRNDVIKYKLYQELKENGYRTLYTDTHVVPEELFGKTFDIEHIIPKARLFDDSFSNKTIELATANREKDNSTALDYVETKYGADSEKAVQYRARVERFFKKTCPSKFKKLMMKEADIPDGFIERDLRNTQYIARMSMGLLRQVARIVTATTGSVTDRLRQDWQLINVLQELNWAKYEKAGLTYAEKNKDGDQVRKIKDWSKRNDHRHHAMDAIAVAFTKPSHIQYLNHLNARRDEEHKKHKVIHAIEQKETDIDSKKKRYFKPPMEINLLRDQVKRHLEATLISFKAKNKVTTWNVNKSKKAKGFHRKKEQTPRGQLHKETVYGKQQVYVTKLVKVGPSFDQDTIAQVAKKSHRQALLHRLHASGGDPKKAFGGKNALSKNPVWLDEHHKEQVPEKVKLVEMETQFTIRKPIGPDLKMDKVIDGRARQLLERRLAKFNGDAKKAFSNLEEDPIWINGKGGAQLKRVTITGVSNAEALHTKHDLHGKPVLDADGLRRLLDEGPGILPVA

SEQ ID NO: 8750 - protein, 1398 aa, synthetic construct
  REGION 1..1398: note = Synthetic
METLGIDLGTNSVAIVKRNSDSSTKNLIEQIEYFGVTIFNKGVGHNKNGEFSYAAEKTKYKSTRKLYRVRKYRIWSTLQVLIENDYCPLSLEDLDKWRKYDTKNGFSRLYPINAFKFEQWVRLDFNCDGKPDYSSPYHLRAEIATKQLDLTKEVDRHKLGRALYHIAQRRGFKSSKGDSIKDIELNDSFDINDLKRSEELKIKEQHKAIEDLSINMKEYPTIGCLLYEIGKKGNRIRKEYQVVRSQLLDEVKFIFDFQKGLSQESKFFLDIKKSIFYQNPPRSQKGSVGKCTLEPQKSRCPISYPDFEYFRALSLINNIKFKKEVDDNWQYLSKEDKQELYERIFSRVRLRFKFEEIREWIEKKHNIILDYKSKTINYKDNTNISGCPITSRIKIFLGDDWKNKIIKSDKKRINKKTGEEKFIHYNWEDIWHVCFSFEDVECLIEFAKSSLKLEDNKKLKELVNIFSSISVGYSMLSLKAIRNINKFLFEGFNYSTSVLLAKMPEIFDSNWASNKDQIIKTLDDIIKSNVYKKRILNIVNALIAEYKSLEFSEQQAAHNTNYQLNEEDKTSIVEFCIKSYGQKSWLKIEDDVKDSLINEVSQKYQDFFASSKRDFYRLPKLVDEIKTFLFENYKFLDEKKIKSLYHPSMIEVYKPSKMELCDYKGVNLCLKLLNSPKTGSFKNPMAMRMLHILRKNINHLLLEGIINEETRIVVETARDLNDANQRWAINKYQEEKERQNSEIHKALCELLSINEVKDSDFEKAKSLIDQAEIIESINSDTILNKENIKKEKKKKIIEKADTFKINTTKYKLWLEQGMTCLYTGKIINLRDLFGENPKFDIEHTIPRSVSLDNSLENKTICCSYYNRSIKKNKIPTELPNYYTDSGDYTAILPRLKAWKDKVDRLENNVEYWKLQSKLAQTKEDKDFRIRQRHLWQMELNHWKGKLDRFELKEVTEGFKNSQLVDTRIITKYATLYLKSVFENVDVQKGIVTSEFRKILKLQELDKKKSRDKHSHHAIDAAVLTLIPASAKRDKILSLWYEMLENRSKNQYDSTIEKKLNKEIRSLNIGNINNFVEEIDDNILINHISKDRALTSTKKKIRTRGKVVYASENNPYYSTGDTIRGQLHGETYYGAIKLAKKDENNNILFDENNKMIIDDKVHFVIRKEISSFKKWEDIEKVIVDINLYHNIKIQNSDKSPEKDTITLTDKKGVKRIVRRIRCYEKSITNPIKLKNHTYLSSKDHKQSYYVNGGDLYSIAKYSNDSEVEYNVFGLFDISKNRELNSEDIPQTIISKKKKQKLELDYTLVSGMKVIVLNKDETFSDIKDILSKRLYVFERPERDLRINLKHHLCADPDIKSESIKDYSKLPSKIRCSINTIRILIEGVDFDMSLFGKIEQK

SEQ ID NO: 8751 - protein, 1338 aa, synthetic construct
  REGION 1..1338: note = Synthetic
MKKILGLDIGTNSIGWALIDSENGFLNKIVDIGCRIIPEQDEHRDFEKGNDISKNAQRRQKRGSRRLNQRYKQRRNNIIKLCKILNIIPSGLEPLFLKTEYSGNAVILPVNAFNKGDFQHKPQELYELRNRALTEKISLQDLFRIIYHFNQRRGFKSNRKTNKEENSRDDIVDDKNNLTEISFEKVRIISVIPTGEKKGKRGKEELLISLKDGRIAVSDKFQFKNFVDKEIILEIKKEFIKSKNDFKFTFSFPSNWQKSRKELNDLIIKNGGYPGKYFFGEFLKAQQENKLFNFKVRENIVNRELYENEFQAVWNKQKELWRYENVDIDFLPGFSGCVERIIPCNNKEQKQLFMSKGLGAFLKNYIIYFQRDLKSQVKSIGDCQFEEKYLEITDLKTGELKLIRNGPKCSPKSHPVFQEFRIWQQIHNLKCFNEKIEEIPISDDVKIKLFEYLNERESAKKEDVDKLLKKILVGFDYSNISEHSTWVGNKTRHFFKKLFKKFDYDGENIFNDSDKYFRLWHLIYSVSDEKGIKTGLKRIDVNMPEELITALTKSIFSEEQYASLSLKALNNILPLMRCGKLFRQENVSKFAESRIKSFLNDDSDSDFDAKTLETLKKKKLYTEFYGLSYYESASLIYGKHSAKQLDLYSSPDEMISIKQNSLRNPVVEQIVNETLMLVKDIWKTYPDLKDGEIKIELARELKSNKEERKEMSRLQYENYQTNEKIIEEIKRHFGDSHNPSLSDIEKVKLWNEARKQSVYTGKTLDISEVLSASTEIDHIIPRSRFYNDGLVNKVVCESSINADKGNMTAYEYMNTGTKLKKLNYNEFLSLIKYLPRGKKNLLTLKEIPDDFIQRQLKETQYITKKVKEELGKIVGNLNVGTTTGRITDYLKDQWGLSELMRNLIAPRFEKLQEQFGINLIKKVDVLNRENKPSGKKRTIIKGFSKRYDHRHHALDALIVSCTRQGIIQQLNLLNQINNNRIKPKEDMFNGSPRKFIPPTGKEDKGASIFYSLAEDAANSIIVSYKNKKRLLAKGNNWYQIFDSASNKIIKVKQTESSTIKKNWSIKGQLHKETNYGLIKYNGALRHSSRCSLSSLTSNKISNIADYTLKNQVLTHINKSEYSGDLKKAFSPEGLMEFNSKRIIPVYSVRVIEDGLIDKVKGKTPLYDFDRKLFVEKGGNYCVAFYEHPETKLRKFDVVSFFDAVHLKVNGENPYQTEMGHGYINEGYRLIFTLSHNDLVYIPQNAVLDSIDWKSKKLFPQIYRIVKFSDNRLYFQPHYFAKEITIHHGVAKTASDYKGEFSKGTNGTEKVFNSDVSIKDICIKLDIDRLGNIKPFYQL

SEQ ID NO: 8752 - protein, 1030 aa, synthetic construct
  REGION 1..1030: note = Synthetic
MDKKSDYILGLDLGSNSLGWAVIQNDGKKNPKAILGMGVRIFNPGMKDLETSNPVTAASDRRNARQIRRQSDRRRRRKLKVYYLLKNIGLFPSGETREGFIERIDKETVGKYLDQSFDPKQFFHIIPYYLRTRALDHQLSPEELARVLYHLAQRRGFLSNRKELRKQDDYGKVKKGISELHQEIENSGNRTIGEHYSKSNPLEKRIRGRYTGRDMYLDEFETIFEKQRQFYPQLLNEDYKNKLKDALFFQRPLKSSRHLVGMCEYEKTSKRCPWYRIEAQQFRILQTLNNLRIMEEKKPSRKLSYEESDILFKALDKTDRLTLTETKKLLNLPAKGTKINFEEGGETRLLGNKTNHVLSQIFGDEYETFTGVQKEDLLHDINSIQSIERLKALGKTKWGLTAEKAELLSEAVLEEGYCGLSLKALKKILPGMKKGISYPEAVKDIYGEFHQKTTILEQIPMLEKSLQNLTNPLVKRCLTEVRRCVNAVITRYGLPQEIHIELAREMKASKERRAKMIQDNRENEKERKRAEAYLESNGITNPSRETITKYLLAEESHWECPYTGKSISHAALFGPTPEFDIEHIIPLSRSLEDSFANKTLCYNEENRTVKRDQTPYEAYISNPDKYNLIQERVSRFRGKFRDIKLDRFMMADASYFEDFTDRHMNDTRYASKLAMQYLSYLYGGLWDEDGNRKIYCNSGAITAYLRGYYGMNRALGGDKKNRDDHRHHAVDAVAIALTSGRSIKELADYAKHSWIYGKARIPGKAEPWEGFFSELEKKVETIIPIHHISNKVSGKLHADTFYGDTGEEGKVTIRKKLESLSKNEVQKIKDSFIRGKVEQILLQKSEAEPQKIFSDPVNLPVIEGKDGINIPVKSVIIETNLKTFTIGSGDRLRRVANESNHHMEIVAVLDENGQEIKWEGYCVSMFEAYRRKKNHEPVILRDFGEGKKFKFSLHEKTMIELDMNDKRELFVVRSIPESLQIMFVKSLDARKQKDIKEAKEWFSKMPDTLRISNCRKVILTPFGEVRYAND

SEQ ID NO: 8753 - protein, 1530 aa, synthetic construct
  REGION 1..1530: note = Synthetic
MEKIRLGLDIGTNSIGWTVVEKQDGVYDFKKQEDRNGELIPSKGSYIFSKSVDANENSKASERRGFRGARRRIDRIRLRKISTLKVLNEFLLCPKFTAGELNRWKNKKIYPCGNDKFIEWQRTGKKNGNSQTEKLKQPYYLRDLAATKEGMMDTENGKLQLGRAFYHLSQRRGYLSNSEEDQSDDKIDLFKSAILNLLENTFDSVSFKTGLEVIFDQYKSDVKVKSLNTKIGKELKKEIVFENIKSFVNTEFNKPENLGKVMSSIGELSNEIKGFSTKEGIPTGEVFPTMGCYFYSIYNTVNKKSGLINKIRGRYTHREEHYLAEFNYICKIQNITGDFKDKLQNAIFYQRPLKSQKGLVANCTLEPKRKRIATSHPLFEEFRMWESINRIKIKRESEGKLYFLNKEEKDLIKNEFLQITDFEFGKIANKLSEGQSYGYIKRPEEVYLKGKKVETESVAVICFNFPMDKKFSACPTIASLKKVIGEEAYNNMQLLNTGYGHEKGKKQLSIEDIWHCLQMDTFGSKDKKTVRTEFAKKHLKLDDKIENFVKIKLVKGYGSLSKSAIKKIIPFLEKGEIYTNAVFLANVTEVLGRKISDTEQKQIAEIIKEALDNFGIEKQNKGIVNNYISKFKGDKENSLGNNQFSIEAYKKGLDYEIANWIGEVQLGIMEKEVISEITKTCWGLFYNAACDKSPKEIIYLSSKTIPEFIYDGLSTVFINDKINVSKLYHPSAMEAYSKADKKLGNPEISSIKNPVFDRAMHQVKRLCNELIRKGLVDKETEVNLEVAGEINSASYRRALTLWQKEQEFIRTWAKNKIIGLNAVEKRSEVIPTSTEIAKYILYKEQNHKCLYTSGKEICVTDFLGNKTTYDIEHTIPRSKFNDNSLKNKTLVNYDFNRNYKKATLPALLKVDFNGKTIDAESILQNRDTYLKSYTIKGEEVTWTVSLNDLKFEYKKFKNAAKAITDAVAHEEVMTKAHYTKMKLDYLREKYRNFEIEEINNQFTNANLVDTRIITKYARAYLNSYFNKVNVVNGKITDTLRKIWGLQGEEESKDRSNHIHHCIDAIVVACVEKGTANKISELYHKYENDYFRGNDNPRIHAKEPMNNFVERLKNLHKEVLVYHKQTDRIKPLLINAQNENVQKLNLRGRLNSQNPYAHIKKNDELIFAQRKPITSIVGSDIENIIDEGIKKRLLTYADLKGWEKLMEIQADDRDEVVEKQIELKKIVVFRLYEKLKKDKKNESLIKRSIVRDDVEIDFFDSNSLIDVVFKGSVIENLDEAKIGLFKNKIVKEVNNLIRSKGLETLLKESEGVIVLPEYKDEKSGKDISKMILKRIRLKSSKSNLKDYKKIREIDRKQTDDNKFDHKHDYYFDKESYTNYEARIYGDLVPNDKGKFKNREYKVINHHNIVNNIFEKESNNSILQLHQDDMFLVFDLKPNDEINWKDIFDLQSRLFKIVKFDENGIIVLVRHNYAGGSVDSAPAIKSESDLSNNSQVVLRRSPSTLRIIPVCLDTLGKIDVGFSKDFVDLNSK

SEQ ID NO: 8754 - protein, 1522 aa, synthetic construct
  REGION 1..1522: note = Synthetic
MRKIKLGLDLGTNSIGWAVIEKQDGKYDFLEKLDKNGDLIPTKGSYIFPKGVNADENSKAAERTGFRGARRRLERLILRKIATLKVLNEFGLCPKFEENELGNWKNKKIYPCENEKFIDWQRTGKKNGNRETEKLKQPYYLRHLAATKDGLMNSEQGKLQLGRAFYHLAQRRGYLSNGEEEQSDDKLELFKTEVRKLLEETNDYTSFKEPFQVLLDNRKSDKVVNTLGNKIIKLLKTEINFDKIKDFIITEFDKPENLGKVMKSIGELSDNIKIAVKNGECAPTMGSFFYSIYAKADKKTGLITKLRGRYTHRNEHYLAEFNYICDKQNIEKDLKEKLHHAIFYQRPLKSQKGMVAMCPLEPKRKRIAISHPLFEEFRMWESINRIKIGREKTKLDFLTKEEKELIKPLFLQKTDFDFVKIANKLSGEEMYCYIKKPQEVFYKGNIIEGGVANIFFNFPLDKKFSACPTISALSKLLGKDKYNEIPFLNSGYKDEKNKTQISVEDIWHCLFLDDFGKKDRNTIRKEFAEKHLKLDEKGIEDFQKIKLVKGYGNLSKSALKKIVPFLEKGEIYSNAVFLANISEVLNRKLSENEQKIVSEKINEAINIHNLEKQNIGIANNYISKVKENKESLGNNEISIDAHKNGIKKEIIEWIGETEYNKLKPEEKDQLFKNCWDKFSLVSLEKSSKEVIYISTKTIPEFILDKLTEAFPKDKIDVSKLYHPSAMEVYKQVDKKLGNPEISSIKNPVFNRSMHQIKRLCNELIKKGIVDKDTEVNVEVAGEINSASYRKAIALWQKEQEIIREWARTEIINTYPKECQKEINPTDTDIIKYILWKEQNHQCLYTSYKPISICDFLDGKTTYDIEHTIPRSKYHDNSLSNKTLANADFNRTIKKDILPGLLNTNYNGELINIETIIRNRDKNLKSYSISSQLQKVSIQWNVSLWSLKEEYKKYKNAAKAITDPISHDEVMTKAHYTKIKLDYLSKKYKNFECVEITNQFTNANLVDTRIIAKYARAYLNSYFKKVNVVNGKITETLRKMWGLEKEYEIKNRDNHIHHCIDAVTVACVEKGTANLISEAFHNYESDYFKGNNNPKYKIKQPMQDFANRMHNLHNEVLIFHKQIDRVKPFLDAVEKGNNTKQNLRGKLNSQNPYAHIKKNDKLIFAQRKPITKISGGDIEDIIDDGIKIRLLNLADTKGWEKLMEFTVKENEVAAEKEIEHKKGIAFKIYEKIKKDDKKKEIVIDNITKQNFSTEFSDFKELIEMLFNATIRYDIDEKKRVNYNEKITNEVANLTRTKGLEILLKESDGVIILPEFYDEKKNKQIGRMVIKNIRLKSGKTDTNIKPYKEYRKIDKSEYDWQHNYYFAKEPGSNYEARIFGDLIPDETGKFKNRNYKLINHYNIVKGRFSIEDSKPILKLHQNDMFLVFDKHFDEIDWNCKSDIQNRLFVLVQFDENGIIILKRHNCALGITGTPNPIKSESNLSDLTEIVLRRSPSTLRVIPAKIDALGKIDVNFSKAFIELNS

SEQ ID NO: 8755 - protein, 1519 aa, synthetic construct
  REGION 1..1519: note = Synthetic
MSKIKLGLDLGTNSIGWAVLEKHDGKYDFLEKKDKKGNLIPTKGSYIFPKDVNADENSKAAERRGFRGARRRLERIILRKISTLKVLNEFGLCPLFEEGELSDWKNKKIYPCKNEKFIEWQRTGKKNGNAEIERLKQPYYLRHLAATKEGLMDFEQGKLQLGRAFYHLAQRRGYLSNGEDEQSDDKLELFKNELTKLLEEVNTINEFREPYKVIFENRNTDKKVKTIDKKINAWIKKEKEYNNLKDSIIEEINKPDNEGKVMTSINELSEKIKEAHEKGNCAPTLGSYFNWIYTKSNNQGIVNKIRGQYTHRDNHYIAEFNYICKKQNIKSELREKLHQAIFYQRPLKSQKGLVAMCPLEPKRKRIAVSHPLFEEFRMWESINRIKIGYGEGSKLDFLTKEQKELIKPLFLQKTDFEFRKIAEKLSGDKTYCYVKTPEKVFFKKDDEPIEGGVAELFFNFPLDKKISACPTTSAISKLLGKDKYKEKPFLNTGYKEEKNKTNISIEDIWHCLFLDDLEKKDRKTIRKEFAEKHLALDEKGIEDFQKIKLAKGYGNLSKAALKKIVPFLEKGEIYSHAVFLANISAVLNRKINDEEQKIIAKKINEALSNHKIEKQNSGIANNYISKVKDNKEGLGDNAISIEAHKNGLKKELIDWIGESEYNKLKEEERDKLLRDCWNKFSDASLNKSSKEIVYISTKTIPEFIFDKLTETFPNDAINVSKLYHPSAMEVYKPADKKLGNPEISSIKNPVFNRSMHQIKRLCNKLIKEGVVDKDTEVNVEVAGEINSASYRKAIARWQKEQEVIRDWAKNEIINTYPKECHHEIQPTDTDIIKYILWKEQNHQCLYTESQISVCDFLGGKTTYDIEHTIPRSKFNDNSLANKTLADAEFNRTIKKDILPGLLNENFKGKTINKESIITNRNSNLKSYSLKNNVPTWSVGLKSLKDEHKKYKVAARSITDSISHDKVMTKVHYTKIKLDYLSKKYKNFECEEITNQFSNANLVDTRIIAKYARAYLNSYFNKVNVVNGKVTETLRKMWGLEPEYAVKDRSNHIHHCIDAVTVACVERATVNWISEAFHKYEKDYFKGNDNPKYQLKPPMNDFANRMHNLHKEVFIYHRQIDRIKPLLDAIEKGNNIKQNLRGKLNSQNPYAHIKKNGKLIFAKRKPITKISEGDIENIIDEGIKNRLLALADIKGWEKLMEFQVKENEDVVEKQKEHKNSIAFKIFEKIKKDDKKKDVVVQSFSKQNLTAEFLDINELITMLYNTIIRLDIDEKKRENYKEKIAKEVTNLTRTKGLELLLKESEGVIVLPEYYDEKKKKQIGRMVIKNIRLKAYKQNQYPLKNYRVIDKSIFDYKTDFYFIKKKGSNYKLKIYGDLMPDKPDGRQKFTKRDDELINSYNIVKNIFDKPKTLPLLFEIYVGSFFIVFDKNIDEINWNDFSDLNKRLFKTKKFDDDKNIILERHNHSHSNEDKYIGSESDLTGNQFFLLKRTTSTLRVIPAKIDTLGNLDVEFSKKFIELNS

SEQ ID NO: 8756 - protein, 1437 aa, synthetic construct
  REGION 1..1437: note = Synthetic
MNRIKLGLDLGTNSIGWSVLEKQEGVYDFFKKEDENGELIPSKGSYIFSKSVDANENSKASERRGFRGARRRIDRIRLRKIATLKVLDEFGLCPKFKSGELNRWKNKKIYPCENGDFIDWQRTGKKNGNSQTEKLRQPYYLRYLAATKPGMMDTNDGKSQLGRAFYHLSQRRGYLSNSEEEQSDDKIDLFKSGVLNLLEKVANSVSFKEELEVIFDQYKNDKKVKSLNNVINKELKKEIVFENIKSFVKSEFEKPENLGKVMAGIGELSKEMKGFPTMGCYFYSIYNRINKDTGLINRIRGRYTHREDHYEAEFNYICEIQKIIGDLKDKLHNAIFYQRPLKSQKGLVAKCTLEPKRKRIALSHPLFEEFRMWESINRIKIKREFDDKLDFLNKEEKELIKNEFSQITDFEFGKIANKLSNGLPYNYIKRPEEVFIKGKTDKDSEIEAVISFNFPMDKKFSACPTISALKKIIGAEKYSTMPLLNSGHKDEKGKKQISIEDVWHCLQMDSFGSKDKKTVREEFAKNHLQLDEKGIENLVKIKLVKGYGSLSKSAIKKIIPFLEKGEIYTNAVFLANITEVLGRKISEVEQNQVSEIIKKSLENFRIEKQNKGIVNNYISKFKDNRENSLGNNELSINAFKKELDYEIANWIGEVQLGSMKKEEVSKITETCWNLFFEAACDKLPKDVNYLTAKTIPIFIEEGLRRVFPNDKIDVTKLYHPSAMEAYPKAEKKLGNPEITSIKNPVFDRAMHQVKRLCNELIRKGLVDKETEVNLEVAGEINSASYRRALTIWQKEQEEIRTWAREKIIECYPEEDRKNKIPTDTEVAKYILYSEQNGRCLYTSETITPRDFLNKQTIYDIEHTIPRSKNNDNSLKNKTLANYDFNRNYKKAILPGLINVNYKGEQIYKETILLNRNEHLKSYSFVGKKPNMNIVWNVSLSDLKFEYKKFKNAAKAITDAVAHDEVMKMAHYTKMKLDYLREKYRNFEIEEINNQFTNANLVDTRIITKYSRAYLNSYFNKVNVVNGKITDTLRKIWGLQGEEDVKDRSNHIHHCIDAIVVACVEKGTSNRISELYHKYENDYFRGNSNPRISSKEPMKNFVERMKNLHKEVLVYHKQTDRIKPLLINAQKENTKKLNLRGRLNSQNPYAHIKKDGELIFAQREKVSNITVKDIQENIVDEGIKKRILNFTKDFNIEEFVKESNKLGYIILPKYYDEEKNKDISEMIIKRLRLKSSKSNLKNYKEVRKIDRNQTIDKYGKLKYGHKFDFYFDKDSYTNYEARIYGDLIPDKPGKKTPFTNRNSNLINNYNIVKNDFPVELNKPIFTLHQGDMFIVFNNNPEEIEWNNNIDLQHRLFKVVKFTEDKEKGEIKQIIFSRHNYALGDVDSAISTSENELYNLSGVVLRKSVSSLRVIPAKIDALGKLDVTFSKDFINSRNN

SEQ ID NO: 8757 - protein, 1430 aa, synthetic construct
  REGION 1..1430: note = Synthetic
MSKIKLGLDLGTNSIGWTVLEKTNGVYDFLKIEDEKGDLIPSKGSYIFSKSVDANENSKASERRGFRGARRRIDRIRLRKIATLKVLEEFSLCPKFEVGELNRWKNKKIYPCENVDFIDWQRTGKKNGNSQTEKLKQPYYLRYLAATTSGMMETVEGRLQLGRAFYHLSQRRGYLSNSEEEQSDDKIDLFKTDVKKLLENCSGSGDFKEPYEVIFNLYKSDDKVKRLNSKIAKVLKIEQLIENIKSFIKTEFDKPENLGKVMAGIGELSKEMKGFPTMGCYFYSIYNTVNKNSGLINRIRGRYTHREEHYEAEFNYICKIQNIAGELKDKLHNAIFYQRPLKSQKGLVAKCTLEPKRKRIALSHPLFEEFRMWESINRIKIKREFEDRLDFLNYGEKELIKNEFLQITDFEFNKIANKLSNGLPYNYIKRPEEVYIKGKFDKEFETKAVISFNFPMDKKFSACPTTSSLKKIIGNENYNAMQLLNSGYKDEKGKKQLSIEDVWHCLQLDSFGSKDKKTVRQEFAKKHLLLDEKGIENFVKLKLVKGYGSLSKSAIKKIIPFLEKGEIYTNAVFLANVTEVLGRKISDNEQKQIGEIIKVALENFRLEKQNKGIVNNYISKFKSDKENSLGNNQFSIEVHKKELDYEIANWIGEIQLAAMKKEEVLEITETCWELFYEVACDRLPKDVNYQSTKTIPEFIYEGLHIFFPDDKIDVSKLYHPSAIEAYPKADKNLGNPEITSIKNPVFDRAMHQVKRLCNELIRKGLVDKETEVNLEVAGEINSASYRRALSQWQKEQEEIRTWAKEKIIDCYTKEFSDNKIPTETEISKFILYSEQNGRCLYTSETITPRNFLNKQTIYDIEHTIPRSKNNDNSLKNKTLASYDFNRNYKKAILPGLLNVNFNGNQINKEIILLNRDKHLKSYSFVGKKPNMNIVWNVSLSDLKFEYKKFKNAAKAITDATAHDEVMTKAHYTKMKLDYLREKYRNFEIEEINNQFTNANLVDTRIITKYARAYLNSYFNKVNVVNGKITDTLRKIWGLQGDEDVKDRSNHIHHCIDAIVVACVEKGTANRGSELYHKYENDYFRGNSNPRISAKEPMENFVVRMKNLHKEVLVFHKQTDRIKPLLIKAQKENAKKLNLRGRLNSQNPYAHIKKDGELIFAQREKIANLTVKDVEENIIDEGIKKRILNFAKEVGLEAFVKESNKTGYMILPKYYDDEKGKDISEMIIKRLRLKSSKSNLKDYKEIRKLDRNQAKDKDGKLKFGHKFDFYFNKDSYTNYEARIYGDLIPNEKGKFINREYKVINHHNIVKNIFEKEESSSILQLHQDDMFLVFNINPNDEIDWKNIQDLQNRLFKIVKFDENGIIVLVRHNFAGGNVGYASPIKSENDLTDISQVVLRRSPSTLRIIPAKLNALGKLDINYSKDFLTSRSH

SEQ ID NO: 8758 - protein, 1408 aa, synthetic construct
  REGION 1..1408: note = Synthetic
MTKVKLGLDIGTNSIGWAVLEKEDRLHHFLKKQVENGNDIPTKGSYIFPKGVDGQEKSKAATRRGFRSARRRIDRTRRRKVTTLQVLSDYGLCPKLSKEEISNWRYKKNYPCNNVEFIKWQRTGTKGGDIETEKYKQPYYLRYLAATKEGLMDSQIGRFQLGRAFYHLAQRRGYLSQEEEQADDAIEQFKIAISKLLEEHTNAPSFSEPFEAVAEMYKNDKKAKSLAAKIRRQLKKESSFPIIIEFIEKEFNKKENLGKVATEINELSQQIANSGQPTLGCYFYSIYGWKHDDGTTQRIRGKYIDREKHYLHEFNYICDKQKIDAELREKLRFAIFYQRPLKSQKDLVAKCPLEPERKRIAISHPLFEEFRKWESINRIKIKTDSDERLRPLNKEEKKSIVSQFDYVKDVEFEKLAERLCGEKDYRYIRDKEKLTAEVEFNFPMTTTFPGCPTIAKIKKVLGKDEKGKYYYSTLPLLNTGYKDEKNKKQISIEDIWHCLFTDSFGEKTKQQARMEFAEKHLNWVDAEAFAKIKLVKGYGSLSKSAIKKILPYLKEGMLYSHAVFTANIEKVLGRKTSPMETEEITDCIKEAMVKHAFEKRVNAVVNNYIDKYKSEEAGFGDDPNSQRAHQNGISNEINSWFSGSELESMTEKERSSLEQQCWNKFVKQATNKRPQNVEYLSTKTVPDFIKDVLAKQFPNDIIDVSKLYHPSAIEVYPEAEMRLGNPEISSIKNPVFNKAMHQIKHLVNKLIEEGLVDKNTEVNVELAREINSASYRRALTQYQKDQKAIRDWARRKIIECYDENVRENIHPTATQITKYILYAEQNGHCLYTGDTITPQKFFTEQKYDIEHTIPRSKWNDNSLINKTLANADFNRNYKQDVLPAILDLTYNGQQVDADTIVQNRDRWLKSYNISSNEIQFNVSLVSLKAEHKKYKLAAKAAAGDALAHDELMYKAHYARLRLDYLAQKYKTFEREEIPAKFNNANLVDTRIITKYARAYLNSYFKKVNVINGQVTDTLRKIWGVQGQYEEKDRSNHIHHCIDAVTVACVEKGTVNRMSEAFHRYERDYFSGDSSAKVYLQEPMENFVDTMKKLKDEVFIYQKQVDRIKPLLEELGKENPQKLNLRGALNKPNPYGLIKREGQDVFVQRSLIKDFGDKDIPSIIDEMIKERLYDLKRQRGDVKIDKLKKDGVIILPEYSYVDRNGKTKVLKEMVLRKIRLKAYKQSQYPLKEIRKIDLSEKEYKRDVYVLKEKDSNYEARLFGDLIPDNPEGRTKFKKREYFLINSIDLVKNKVLIRPKYPFLFSIHTGDQFLIFDKHPDEINWNAQKDLNMRLFKIKKFDEDQNIILQRNSHSSSEKDVYASESKIDDMDAFLLKKVPSSFRAVPTKVDELGRIDIQYSKAFIEKHTR

SEQ ID NO: 8759 - protein, 1013 aa, synthetic construct
  REGION 1..1013: note = Synthetic
LFLDDFGKKDRNTIRKEFAEKHLKLDEKGIEDFQKIKLVKGYGNLSKSALKKIVPFLEKGEIYSNAVFLANISEVLNRKLSENEQKIVSEKINEAINIHNLEKQNIGIANNYISKVKENKESLGNNEISIDAHKNGIKKEIIEWIGETEYNKLKPEEKDQLFKNCWDKFSLVSLEKSSKEVIYISTKTIPEFILDKLTEAFPKDKIDVSKLYHPSAMEVYKQVDKKLGNPEISSIKNPVFNRSMHQIKRLCNELIKKGIVDKDTEVNVEVAGEINSASYRKAIALWQKEQEIIREWARTEIINTYPKECQKEINPTDTDIIKYILWKEQNHQCLYTSYKPISICDFLDGKTTYDIEHTIPRSKYHDNSLSNKTLANADFNRTIKKDILPGLLNTNYNGELINIETIIRNRDKNLKSYSISSQLQKVSIQWNVSLWSLKEEYKKYKNAAKAITDPISHDEVMTKAHYTKIKLDYLSKKYKNFECVEITNQFTNANLVDTRIIAKYARAYLNSYFKKVNVVNGKITETLRKMWGLEKEYEIKNRDNHIHHCIDAVTVACVEKGTANLISEAFHNYESDYFKGNNNPKYKIKQPMQDFANRMHNLHNEVLIFHKQIDRVKPFLDAVEKGNNTKQNLRGKLNSQNPYAHIKKNDKLIFAQRKPITKISGGDIEDIIDDGIKIRLLNLADTKGWEKLMEFTVKENEVAAEKEIEHKKGIAFKIYEKIKKDDKKKEIVIDNITKQNFSTEFSDFKELIEMLFNATIRYDIDEKKRVNYNEKITNEVANLTRTKGLEILLKESDGVIILPEFYDEKKNKQIGRMVIKNIRLKSGKTDTNIKPYKEYRKIDKSEYDWQHNYYFAKEPGSNYEARIFGDLIPDETGKFKNRNYKLINHYNIVKGRFSIEDSKPILKLHQNDMFLVFDKHFDEIDWNCKSDIQNRLFVLVQFDENGIIILKRHNCALGITGTPNPIKSESNLSDLTEIVLRRSPSTLRVIPAKIDALGKIDVNFSKAFIELNS

SEQ ID NO: 8760 - protein, 1515 aa, synthetic construct
  REGION 1..1515: note = Synthetic
MSKIKLGLDLGTNSIGWSVLEKDNGKYNFLEFKGENDNLIPTKGSYIFQKGADAKENSKAAERRGFRGARRRLERIILRKIATLKVLNEFGLCPPFDEGELNKWKNKKIYPCENEKFIEWQRTGKKKGNSENEKLKQPYYLRHLAATKDGLMESKEGKMQLGRALYHLSQRRGYLSNGDEEQTEDKLDLFKTEVSKLLEETNDAGAFIEPFQVLFENRKADKKVITLGNKIQKELKKEIEFEKVRSFIITEFDKPENLGTVMKSIGELSEAINKSGQPTMGSYFYTIYAKADKKTGLITKIRGRYTHREIHYKQEFLYICQKQNIKGELKDKLYNAIFYQRPLKSQKGLVAMCPLEPKRKRIAISHPLFEEFRMWESINRIKRKDEGQKQLDFLTTEEKELIKPLFLQKTEFEFNKIANKLSGEKMYCYIKKPNEVFYKGNLIEGGVADLYFNFPLDKKFSACPTLSVLIRFLGKEKYNELPLLNTGFKDEKGKTQISIEDIWHCLFLDTFGNKDKKQGRKEFAEKHLELNLKGVEDFQKIKLDKGYGSLSKAALKKIVPFLKKGEIYSHAVFLANITKVLSRNLNDDEQETIAKKISEALNIHKIEKQNDGIINNYISRLKEKNENLGNNSFSIEAHQKSLKEEILSWVGETQFNIMTEKEIAEIFDNCWYKFSASSLDKNSKDIPYLSTKTIPEFIFEKLSEVFPTDKIDVTKLYHPSAMEAYPIAHKKLGNPEISSIKNPVFNRSMHQIKRLCNELIRQGIVDKDTEVNVEVAGEINSASYRRALSQWQKEQEIIRAWAKNEIIDTYPKDCRHEINPTDTDVIKFVLWKEQNYQCIYTGNQISICEFLGGKTTYDIEHTIPRSKFHDNSLSNKTLADAEFNRKVKKNILPGLLNENYKGKSITKESIILNRNANLKSYSLKNNVPTWNVSLKMLEEDFKKYTIAAKATSDPIAHGEFREKVHYTKIKLDYLSSKFKNFENKEITNQFTNANLVDTRIIAKYARAYLNSYFNKVNVVNGKITDTLRKMWGLEGEYAVKDRSNHIHHCIDAITLACVEKGTANWISEAFHLYESDYFKGNDNPKYKLKEPMDNFAERMHNLHQEVFIFHKQTDRIKPLLEALKKENPKKQNLRGKLNSQNPYAHIKKNDEFIFAQRKPITSIGGGDIENIIDEGIKVRLLKLADDKGWVKLMDFHVKDDENSEEKELEHRRTIAYRVFEKIRKYDKKKEIVVQSVTKQNISSDFTDLKGFVASLFNTIIKIDVDEKKRVSYKEKIENEVTNLTRTKGLELLLSENKESEGAIILPEYYDEKNKKQVGRMVIKKLRLKSSKTNLKDYKEIRKIDESKFEHKRDYYFDKDSYTNYEAQIFGDLIPNENGKLKNRKYKLINHYNIVKNIFEQETEKPILKLHQDDMFLVFDKMPNDEIKWESKKDLQNRLFKIVKFDENGILVLVRHNYASGNVDNAKAIKSEGDLSNLSEVVLRRSPSTIRIIPVKIDTLGNIDIEFSKKFIELNL

SEQ ID NO: 8761 - protein, 1425 aa, synthetic construct
  REGION 1..1425: note = Synthetic
MSKRKLGLDIGTNSLGWTVVEKEDGVYDFLKIEDENKELIPSKGSYIFSKSVDANENSKAAERRGFRGARRRIDRIRLRKIATLKVLDEFGLCPKFKEGELNKWKNKKIYPCDNFDFIEWQRTGKKNGNSQIEKLKQPYYLRYLAATNAGMMETAEGRSQLGRAFYHLSQRRGYLSNSEEEQSDDKIDLFKTDVIKLLENCTGSGDFKVPYEVIFNLYKSDDKVKKLNSKISKVLKNELLLENIKAFIVSEFEKPENLGKVMAGIGELSKEMKGFPTMGCYFYSIYNTKNKNTGLINRIRGRYTHREEHYEAEFNYICKIQKITGDLKDKLHKAIFYQRPLKSQKGLVAKCTLEPKRKRIALSHPLFEEFRMWESINRIKIKREFDDKLDFLNKEEKELIKNEFLQISDFEFSKIANKLSNGLPYNYIKRPEEVYVKGKTDKDSEIKAVITFNFPMDKKFSACPTTSSLKKIIGSEKYSTMPLLNSGYKDEKGKKQISIEDVWHCLQMDNFGSKDKKSVREEFAKKHLQLEEKGIENFLKIKLVKGYGSLSKSAIKKIIPFLEKGEIYTNAVFLANVSEVLGRKISEVEQNQVSEIIKEALENFRIEKQNKGIVNNYISKFKDNRENSLGNNELSINAFRKELDYEIANWIGEVQLGSMKKDDVTKITETCWNLFFEAACDKLPKDVNYLTAKTIPSFIEEGLREVFSNDKIDVTKLYHPSAMETYPKADKKLGNPEITSIKNPVFDRAMHQVKRLCNELIRNGLVDKETEVNIEVAGEINSASYRRALSIWQKEQEEIRSWARHKIIECYPEEERKKIIPTDAQIAKYILFSEQNKKCLYTREEICPRKFLNKQSSFDIEHTIPRSKNNDNSLKNKTLANYDFNRYYKKTTLPSLLNVNFNGIEINKESILYYRDTYLKSYSFVGKKPNMNIEWNVSLSDLKFEYKKFKNAAKAITDAVAHDEVMTKAHYTKMKLDYLREKYRNFEIEEINNQFTNANLVDTRIITKYARAYLNSYFNKVNVVNGKITDTLRKIWGLQGDEDVKDRSNHIHHCIDAIVVACVEKGTANRISELYHKYENDYFRGNSNPRISAKEPMKNFVERMKNLHKEVLVYHKQTDRIKPLLINAQKENAKKLNLRGRLNSQNPYAHIKKDGELIFAQRKPISSISSKDIDNIIDEGIKKRILDFANEVDFEAFVKESNKVGYMILPKYYDREKDKEISEMIVKRLRLKSSKSNLKDYKEIRNIDQKKTQDKRFDHKHDFYFDKDSYTNYEARIYGSLLPNIKGKFKNREYKVINHHNIVKKIFEVENENSLLQLHKDDMFLVFDLNPNVEIKWENIIDLQNRLFKIVKFDENGIIVLVRHNFAGGSVDSASPIKAESDLNDVSQVVLRRSPSTLRVIPAKLNALGKLDINFSKDFINSRND

SEQ ID NO: 8762 - protein, 1086 aa, synthetic construct
  REGION 1..1086: note = Synthetic
MKGPYRIGLDVGTNSIGWCIYRLDDNDAPIALLRSGVRIFSDGRKKDDLSSLAAERRKARQARRRRDRLLSRQHHLVGDLIRFGLMPEDDGERLALSTLDPYELRSNGVDQPLTPHQFGRTIYHLAKRRGFRSSRKTKGEDDKDSGKVKGAIKRTEQAMDEAGCTTLGQYLAHRRKQGLPVRARRDPNDEYLLYPQRDLVAKEFDILWEKQASYHPAICTEPARAAIRHTLLLQRPLRPVEPGRCQFEPDQPRIPKCSPLFERYRILCDVNHLRIRRDGEESLLTLEQRDTLADALARHADRKPIPFADMAKRLKLPRGASFNFEKDRKRTGFKGDATAPIAAAIGDRWTRISDLQQEALAVLLEMAPDNELLLSALSALPKDIGPAKQISRSIEAPQRIQPWLDALSRLPFAFDQQAVAALLAVGHLPDDYGSLSRKAIEHLLPFLEAEVITYDQAVAKSRYVSHSDFYTGEIRPRLPYYGKVLAGYVSPHPRRYEVATEPNDDDPKQMHLVEKYFGRIPNPTVHVGLVQLRLLVNAMIKRWGPPREINIELTREFGMSGRRRKELKDEQDKNRKRNDKINAELRKLGQRENRENRHRYLLWEELGGSDPLYRACVYSGRKLCLTDTTDSLCVFSSDVEVDHLLPFSRTLDDSLTNKVLCATEANRIKGNRSPHEAFSGGMHGFDWQSIVERSRDLPANKAKRFKEDAVETALGERGFLARHLNDTAYLSRVAREYLTTICPPQRVRVTSGRLTGMLRAIWGLNDPSGVNAGRKYREDHRHHALDAAVIGACDERTLQAMSQAARNAEDAGQNRKFKQFPPPWPDFRERVLESYERITVSHKPDHGVQGGLHNETNYGMREPAAKKGDSPKVWHRVAIESIELNNVEIVPGKTGRPSAKVANPALREQLYALLRGKTPVEARQALLEFSRTTGIRRVRVEERLSVVGIRDRYGERREYRYVATAGNHCLLIWRNAKGQWRPKVITTFRANANNFDLRRETGPDGEPVVLRLRKEDMLVLEENGVAVVRRVVKISEKSVFLADHREANPSADKKLKEWSPEQLRKAAARSVGVDPLGYVNDPGFRS

SEQ ID NO: 8763 - protein, 1377 aa, synthetic construct
  REGION 1..1377: note = Synthetic
MKKLGLDLGSSSIGWALKEDKEFLGKGVVTFKAGMSEGRSGGYSSPTKDRREARAKRNLIKARKQQKWELLKILTEKNFVPIEKYELEIWSRYKKGQLRKFPETETFLKWLACDFRYNNQKNYKNPYELRIAALDGKVSDHEFGRALYHLVQRRGYRNIGVPFFVEDGSKYESTEKDKETKTQLERRERDGFKEAMDKHGVLSKALKNEFLDKGKRARNQYTLRGEYQHEFEQICEKQGYDISKGENSYNDPFIQSLWKAIIWQRPLKSQKGNIGKCTLETSRLRCPASHPVFEIFRAFSFINTIKYVSSGGEKEPIAQELRDALFEGVFLKKDKNFKFEDIRKFLDIKIGSKKQYNYPVNEKGEYDTSVSGMPITKGLISIFGDEVKKAVYTLEQYNIGTAPKIIHGKYSIYDLWHILFDFDEAYLKKYAVNSLKVENKKNKKEEVFNPFAKLKQSVQSGYADLSLKAMCKIIPFLKDGHLYNEAVVLAKIPELLGEEWETQKEEISQAFQTAKNAYADHKTIINITNKLIEQWKAEKELWDNGEGQVKAWKDYTYELDHYDEEDILKTCEGYFGEKSWEDLKDRQKITESVEEEYQAFYKDQKRTYRQVPTLSDLFKEELTKIGITTKDGDLYHHSVKENRYLKKYLNTKTGEFELPEDTKTGLSLLPEATTDSIKNPMFNKAMSMLRKVINELIKSEKIDEDTEVTIEVARELNDNNKRAAIERYQREREKKREKYRKFLEEFKEKEDRKDINVENSLDEFELWTEQIFEETTDEEGKPIQQREAILKEKSDIDRYELWIEQKGLCMYTGNTISIAQLFSNKIDIEHTIPRSILPDNTMANRTVAYAHYNRDEKGKNLPRHLYNFDKEITHRLDHWRKERDKWRKERDKCLFKSHTKAKGNEDEGAKNKRIQKKHYFKMHYDYWADKIARFEAKEVKDGWARRQLVDTQMVSKYAREFLKSYFKKVEVQKGEVTAIFRKIHGFQEEDEIKNRNKHTHHAIDAAVLTLIPANSSNRERMIKQYHKEEENKQPTQKKPFASFNPQTLIKDIESGTLIVNYTTDTILKQTVKNVRKRGRLQYLEKNGNKIQPKAKGDTIRSQLFKENYLGKIRNVKRDADGKLRREQGKWIFESGKNEFTFTKRVPVDGVKTNDIIDPKIKDIVANAKAENTIPIDAQGKTIRHVRIKASTGREVKKRLNYLSKHDYKNKFYSEAGSIPYAIMVEKEKKRLIPLPSFEIAKAAKDLNIRKWDEADIEKYLSKCPPKLSGYSGKRLLRVGQKVIVFKSDEEYHQKEDLAFQMNRMYYITQFHSDGRRIYLRYHLEARSRDEINKYPASIEVEGDTPLLLMSSKNWNFLYEGEDFEISLLGEIKFIKNH

SEQ ID NO: 8764 - protein, 886 aa, synthetic construct
  REGION 4..31: note = misc_feature - Xaa can be any naturally occurring amino acid
  REGION 1..886: note = Synthetic
MGIXXXXXXXXXXXXXXXXXXXXXXXXXXXXWELLKVLLNDYVPLNEVELNEWCHYQKGRRRKFPESEKFLKWLACDFTYQEGEKYKNPYELRVKALDETLSKHELGRALYHLVQRRGYKDIGETDQETEKQILRRGESGFQNALDTNRTIAEALATEFLDKGERARNQYPYREEYKNELELICKSQGFSVATNEKGDYSDVFVKNLWKAIIWQRPLKSQKGNIGKCTLEPSKLRCPVSHPAFEIFRALQFINTIKYFDANNEKQSINKELKDKLFKNVFLKKDSNFIFEDIKEFLNKETKTINKYNYPINPKNNQYETSVAGMPICKSLVSLFGDDIQKALLDIEKFNIGNAPKVINEYSIYDIWHIVFDFDEQHLGKFAVEKLGIENVTRKRKGEDVSISPLVELKRKFLQGYSDVSLKAICKIIPFLKEGYLYNEAVVLAKIPELMGNDWKSSQQIILDILTESNKIYQEKSTIASISNNLIDKHKGQTRAMIDGSEEQVFAYKDFSYLLKDDDIKDVKNACISYFGENSWNKVKDQEQLIQKVGLEYQEYFFDHKRAYRKTDTLTDIFKSLLKEKNITLTGELYHHSNRENLYNKNLEVNFKTGEKYLPKYKDTEIEILPIPFIDSIKNPMFNKSMSIVRKLLNELIINGEIDQETEVTVELARELNDNNLRAAIERYQKERRDNRDKIRKFLQQYNDEENRTINVEDNISLFELWTEQIFEETEDESNNKIQNKNRLDILREKEDVKRYELWTEQKGQCMYTGKMISISQLFSNEIDIEHTIPRSILPDNTSANQTVAFSKYNRDIKGARTPFYCENYSKDTPNGTSISPRLDSWKKLRDYYKIQYETRRRAKGAEDENTKNKRIQDKHYYKLHLNIGTIN

SEQ ID NO: 8765 - protein, 1506 aa, synthetic construct
  REGION 1..1506: note = Synthetic
MKRILGLDVGTNSVGWAVVNQSKDGEYGTIEKLGSRIIPMDQGVMDQFAQGQTESTTAERTRYRGVRRLRERSLLRRERLHRVLHVLGFLPTHYDESIGWNKNDNKTYGKFLPGTEVKLAWAATDEGHRFLFYDSYLEMLEDLKVHQPSLSKTSKTPVPLDWTIYYLRKKALTQPITKEELAWILLQFNQKRGYYQLRGEEEVVDDSKKEEYYALKVVKVELDTENRSKKDWYNIHLENGWIYRRSSNVSLDNWVGLTKEFIVTTRLDAEGNEKLNADGEVQRSFKNPSEDDWGLIKKKTESDLLKSGKTVGAYIYDNLLTQPNQKIIGGLIRTIERKLYREELNEILTTQCQFNRALQNKELFQKACYELYPKNENHRKNLLTKDFKHLFIEDILFYQRPLKTKKSLIANCPYEYRVFIKEGKKEIAPIKCIAKSNPYFQEIRLWQFIDNLKILEREVEVDGSIAYDVDVTANFFKNETDWVNLFIWLNDKKSVKQDELLGQFLGLKKDKGKKEHNYRWNYVEDRDYPCNETRALLLKALSYCEAEDRLDDFSFTYSLWHLLYSVEDKIELKSGLEKFALRHQLPQLFVEQLLNTPPFEKEYGSYSEKAIKRLLPLMRRGKYWDIDAIDNKTKQRIQRIIDGEVDDSISIRAREKLEGYRTLEQFTALPLWLAGYVVYSRHAESGDVTKWDSPEALDHYIQVEFKQYSLRNPIVEQIVLETLRVVKDLWSLYGDFSEIHLELGRDIKNSASVRNRISTRQQENENTRQRILNLLMSLKKEARYAELNPYSPSQQEKMRIVEEGVLNAQSQLPKDIEKIATSAKPSSKEMQKYLLWLDQKYCSPYTGKPISLARLFTSDYQIEHVIPQKRYFDDSFSNKVICEAEVNSLKGALLAHEFIQREGGSTITVGTTTVEILKPQEYVALVNRTYGVKNKLKAKKLLATDLDEVIDGFSARQLTDTRYINRVMMRLLSGVVRDKDEAESTSRNVIPCAGRVTSVLKHHWGLNDSWDKLIQPRFERLNKMTNSSDFGVWVASNRFQIRVPFDLQKGFSKKRIDHRHHALDALVIACTTRNHVNFISNSYSRDVKDRKGFRYDLRAQLCEKEYNKGSSDNYSYQFRKPWDTFTEDAYVALREIVVSHKQNTRVLTKANNKTEYINSLGKKALQPQTKGDHWAIRKPLHQETIFGRTTLREVKTVSLKNALESNWKALVSKLLKQSIEDLIFQYGGKYDAKVILKYFKDREYQFNGEDIRRVEVYEYNNNYAATRKAIDDTLTLKQIDRITDVSIQNILKNHLERYDGNLKEAFNPEGVADMNKNIKALNGGKNHCPIYSVRLYEDMGAKFALGTTHNNPDKFAIAAKGTNLYFGVYEDEKGKRSFDSIPLHVVIERLKNKQSPVPPTYKNNQLKFYLSPNDLVYVPTEEEQKNSELVDITNLSIEQKERVYKVVSFTGIQCFCLLNSVAQSIVDKKEYSALNKMERAIDGTMIKQVCWKLKVNRLGKIEKICK

SEQ ID NO: 8766 - protein, 1504 aa, synthetic construct
  REGION 1..1504: note = Synthetic
MKKVLGLDIGTNSVGWAVVNQNDKGEFLSIEKIGSRIIPMSQDVMDKFGAGQTESSTAQRTQYRGVRRLRERSLLRRERLHRVLHILHFLPQHYDAAIGWNKKENKTYGKFLPGVEVNIPWVATDQGHQFIFMDSYAEMLKDLKQHQPHLFEKSSTPVPLDWTIYYLRKKALTQAISKEELAWILLNFNQKRGYYQLRGEEVEDNTKREEFYALKVVKVELDKDNTSAKTWYKVHLENGFIYPCPSDTPIDSWVGMVKDFIVTTTLEKDGSEKRTADGEIKRSFRAPKEDDWTLLKKKTESELEKSGKQVGAFIYDTLLSNPDQKIIGGLIKTIERKYYKKELEQILETQQKFIAELSDKKLFQACAEELYPLNDSHRENLLERDFKHLFVQDIIFYHRPLKTKKSLISNCTYEYRTFYKNGEKQISPIKCIAKSNPLFQEFRVWQFVQNLRILQRQRSEGDSIKYNVDVTAEFLKDENDIANLFTWLNERKVIKQDQLLKSYFKLKVNKETKELDYRWNYVDDKNKEYPCNATRTHILSFLEKCKEEKRIEDDRFVYSLWHLLYSVVEPIELRGALAKFAEREHLHPSFVDVFAQFPPLEKEYGSYSEKAIKRLLPLMRMGDYWHEDKIDVKTKQRIQRIIDGEADDDITHRSREKVENLRSITDFKGLPLWKAGYVVYNRHSESGELTKWKTPHELSNYIQNEFKQYSLRNPIVEQIVLETLRVVHDLWVKHGDFSEIHLELGRDIKNSSDKRKRMAERQQENENSRQRVLEMLIDLKKEAAFADLNPYSPSQQEKLRIVEDGVLRSNIEIPKDIEKITKSAKPTSRELTKYRLWLDQKYRSPYTGQPISLAQLFTSKYEIEHVIPQAKYFDDSFTNKVICESEVNKEKGSMLAHEFILKNGGSTVNVGGRQVQVLKNDAYVELINRLYGKNNPVKAKKLLAEDIDEVVGDFSERQLNDTRYISRVVQKLLSNIVREEDEQESTSKHVIGCSGQVTTALKKDWGLNDIWNKIIQPRFERLNEMTATEDYGVWQSPNHFQIRVPEEIQKGFTKKRIDHRHHAMDALVIACATRSHINYISNRSGQDRNAKFETTRTDLRSKLCYKENSSGNNYNYIFNKPWDTFTQDAHRALENIVVSHKQNLRVLTKTNNYTQFINKDGKKDLQKQVKGDHFAVRKPMHQETIYGRVSIRSIKEVALKKALENWKQIVDRTLKDKIRELIGAYGKYDAQTILKYFKDRDYKFNNLKINRVEVYEYDHNCAAVRKSIGDDLTIKQIERITDESIRKILMNHLSNYDDNLKEAFSPEGLMEMNKNIKELNGGKNHQPIYKVRLFEDLGSKFPLGVSHNNPDKYAIAAKGTNLFFGIYEDQEGKRMFDSIPLNIVIDRLKEKKSPVPETYNESKLKFHLSPNDLVYVPTDEEQKQPELVDVDHLSDEQKGRVYKAVSFTGNRAFFVNHRVSKVIHDYVEFGTKNKIENDDDKRSLKHICWKLKVNRLGEITDVKR

SEQ ID NO: 8767 - protein, 1457 aa, synthetic construct
  REGION 1..1457: note = Synthetic
MKKILGLDIGTNSVGWAIINKDSDGPQSIVNLGSRIIPMSQDVMDKFGKGQTVSSTAERTGYRGVRRIRERSLLRRERLHRVLHILGFLPKHYDQVIGWDRSDNRTYGKFLPGIEIKLSWVPTDSGNQFLFMDSYLEMLKELKQEQPELFETSDTPAPMDWTLYYLRKKGLKQALRPAELAWIILNFNQKRGYYQLRGEEQEVDPKKREEYHALRVVRVEVDPESGSLSKPWYNAYLENGWIYRCQSNKPLDSWVGMIKDFIVTIHLADDGSEALDREGNVRRNFRAPGEDDWTLLKKKTESDLQKSGKTVGAYIYDTLLKQPSQKVRGELVRTIERKFYRNELELILDKQLEFIPELKSKELFDACANELYPSNHNHRANLLTKDFKYLFVNDIIFYQRPLKTKKSLIANCPYERRSYKKDGERVYVPIKCIAKSNPYFQEFRLWQFIENLRIIQHQKEMDDSIQYNVDVTSDYLPDEVSYVKLFDWLNERKEVKEDQLLRNFFNLKKDKISKEFSVSWNYVKDRTYPCNETRALLISGLEKCDSLSWLDSKEKEYRLWHLLYSVEDPKELRGALAKLADKESLSSDFVDIFSKLPSFEKDYGSYSEKAIKKILPIIRKGSYWSADAIDSRTQKRIQQIIDGEVNESIDMRAREKLESLREIAAYKGLPLWLAGYVIYNRHSEAGEIKKWNTPEDLEYYLTHEFKQYSLRNPIVEQIILETLRLVKDLWEKYGDLSEIHLELGRDLKNPAKKREADTKRNVDNENEWMEIQEKMLEFHREGLISNPYSPSQKMKYKLWLEQNHISPYTGEAIPLTKLFTSSCEIEHVIPQGRYFDDSFTNKVVCESEVNKLKSSMLGHEFIKSKGGEAVLIGGTQVRILSVPKYVALVDRLYSSTNPTKASKLLLEDIDDLNKDFSERQLNDTRYISRYAMSILSAIVREDDEKESVSKNIITCSGKITDVLKRSWGLKDIWDGLIQPRFERLNTMYDTQEFGKWVTSNKFQVRIPLELQRNVSKKRIDHRHHAMDALVIACATRNHTNYINNMSAWRGEDYKKVRYDLKKKLIDENSSERDTFIKPWPNFTVDAKKALERIIVSHKKNLRVLTATVNHTEYIDNQGKRQLKKQESNDHYAVRKPLHQETIFGRVSIRSIKQVTLSKALENYKSIVDKHLKAKVREVIAEYGGKVDSKTLNKYFKDRDYKYEGLDIKRVEVYHYDHDCAATRKPLNDSLTLKQIEKVTDESIRKILYNHLDNYAGDLKEAFSVEGLVAMNKNIKTLNGGVPHHPIYKVRLFEDLGSKFALGTTNNNPSKFAVAAKGTNLYFGVYVDENGKRSFDSIPFNVVLNRIKSGLSPVPDVFGKSNLLFYLSPNDLVYIPSSIELNEEFCINEINNNRLYKMVSSTGFQCFFSQNNMAQSIWDKKEFSALNKMERDIEGNMIKQVCWKLVVNRIGEITDVIR

SEQ ID NO: 8768 - protein, 1143 aa, synthetic construct
  REGION 1..1143: note = Synthetic
VRRRRLILDSVRQTPAAMEASAMHVLGTDVGENSLGLASIEVDENGSPAAVNRLMVVLHDNGRDGMASGSGGSVSRKASGGSARRVRRLYRNRRRRSIELEKRLRQLGYPVVAPEPLQTYEEWRSRQELLREHIKDDDSRRSLLSIAIRHMSNHRGWANAWVSLDTYLWKEEPSPEFKQAVEDLVASERFDFATAPQEIHYQADLAAFGLRQDERLRPRQPQRPGPDAVPPEQAHLLGSQRRVDVVREWRQICRVQQVPDDHFEQLARIAFSQEKPSIPAERVGNDWLPGFKNRKRASRASLEHQEFQIRQTVANLRIRENGAKRRLTVEEQKRVVDHLFAVTSKNDAPTWKDISEEVLQVSPRSLVTADRDQSVGSVAPTLRSVATVNTLPKRHPIRQWWDTANDQDRRDFIRWIADPVKLKRPARIESQIEPILEALNDKQAEAVQRLTFPSGRDAHCVDALDLMNAEIERTGKSYVEVRNYLFDLDEQKNAPTPSTLDVVADHPTLQRILPPMRRFLQGIVSKHGEPERVVIEHVRSAFQGFQAREDALSEQRRNQRDRERAAEHIRHAYGISEPSNHMIRRVQAFERQGSRCLYCGSTPGFGDIELDHIVPRKTGGNSTRANLVAVCRACNAAKGKRTFVAFAATSQREGVSLEAALQRIDELQQGQLDRRAFSRLKREMRRRLKQDEFDDPIDERSLASTAYAAVDIRERIQGTLSLGTGEVPVYSGRIIQAARKASGIDRVIRIREGVHAKSRFDRRHHAIDAAVAAMINPSVARTLAERDDMRRAAYESNEDRWNWTTYEGSTPEAVRKFCKWKEDMQELARLVDEVLKHDDVVVTYPVRFSAKHAALHEAGRSPHRTKAVGEAWTSGERARIVDGRVYEALSKDLIPSAPLHEDESRTLTLPSGMRLDGKGEVYLYPDAKARMPLPNKSSAPLGQSMHHVRLYRWLTPKGEVKAGVVRVWAADLYELEDGIEGDLLTSPLSGTSQAVRRTANARLRDAIHQNAAEHVGTFVIGDELLIDPYEWRGANETGRFMDEWPERHWRLSGWEQLGVANIKPVLLSEEGIRKKAEDTSDRLVDVSTLTKKVLKASLRITASQLWSTPSTQVIRRTATGEPRQNISSGLPTSWSPIKAVYGE

SEQ ID NO: 8769 - protein, 1147 aa, synthetic construct
  REGION 1..1147: note = Synthetic
MGLVEGNRLLVGVDVGENSVGLIALECDTELIPQRVLRALVVLHDSGRDGMASGNSGSKSRKRSGGEARRVRRLLRNRRRRTILLEEQLAARGYPVGPRDARGTYEPWDARLDLLDGFIEDDDERRRLLAIAIRHMSNHRGWANAWVDFETYLRKEEIQSSEEFRIAVDAVVAADAFGELSTSDLLYQADLAATGLNTQSRLRPRNPTRPGANAVTVAHVLGSQRRVDVAREWQRICRVQEVPHEDYLALARIAFRQERPKVPVEKVGFDWLPEHRHLRRATIASLEHQEYQVRQTVANLAVRTDRLDRHPRPLTVDEQTLIVDHLLGVTKKDEAPSWRHIAEEFLGISPVRLVHSEPDQSLGGAAPILRSTAAIHSLKSTHPVRQWWIQAPGALRSDFILWLADPAKIEIPEESVAEFTTLFESFADDEKLNDEVLKLRFPSGRSAHSLEALRLMNAEMAKTGERYVPLRNRLFNGGHDLRPMDLQTLDSEADHPTLQRILPIVRRFLLGIERQYGAPERVVIEHVRGAFLGFEAKLEAARDMGRNRASRQRVQQDVVDAGLATNAADVSDGVVKKFQAIRRQGSACLYCGWSAPGFGGWGIFELDHVVPRDSGGNSTRANLVAVCRDCNAAKGKQTFATFAGSGRRPGVSVEGAIERAKSINDPDVHGKAAFRLRGELIRRLKQTEEDDPVDERALASTAYAAVDLVRRVNTHYHDDPAAGRTKVYSGRIISMARHASGIDKRVPVRVGVDVKSRFDRRHHAIDAAVAALLNPSVARTLAERDDLRRAALTEAQATGQEVDQGWKIYEGSTPAACERFQTWKSAMQRLADLLEQEIERDQIVVAQPVRFSADHAALHEDGRLPHALKALGSPWTSDERARIVDDRVYSAVSQGVRPSADLQSDPERVLILPSGRQLAAEDPVFIFPDTAARIALPNQSSAKLGQSMHHARLYRWDDAKGRRQAGVVRVWASDLYDLVGGIRVDLLSAELPESSRAVRRAHPKLRDAIWSGAAEHVGTFVVGDEVLIEPAEWMGNNEPGRFLDEWPEKHWRLASLMSDSQFRMTTIYLAQEGIAPREDGASEDRRLVAVSPVARKVLESYLTITSSTLWNTPSTQILRRTALGSIRTDPRSGMPSSWTPYQAVYGD

SEQ ID NO: 8770 - protein, 1185 aa, synthetic construct
  REGION 1..1185: note = Synthetic
MKLLGLDIGSNSVGSAWIDTEAESIKMGVSVFPAGVEEQTDKRGAPKNQARRSQRQQRRSIERRAKLKRRLRQYLIKKSWIPTERNKLKVCQNLNPWILRKDALHRELNELEFGRILLHLAQRRGAWWFDEEPEEPEERKKKKKDPAETPGTVEYTKRIMEDKKAKTFGELIAIEYEKRKTATGNKDKKRNDRIRNRNDAFGDKVSEFVADRHMILVEFRKIWETQNSFGGQLAKQLTDDCKKEIYNPKKTETWRCQGVLFSQRKAYWNLGTLGRCDLEPTDMKCPKADMYAQEFLVLTSVNNIRITPPTEASRKLTEEEREKVVSAVRKQKTATESTIRKALGIDKGKNKTLYTLNTEGDKFTVNGDWFYSQIVCNVFGEDTWLSFDDGKKDSVNRAILKFDPKDEANENKLKTGCKEWWKLDDKQTESFLYAWKKRPMKESRVNLSRKAIKNLLPYLREGWSVTEARDMYAEDASNDANDLTRRRYSTREIVINKQIRHFQDKHPNLLPPVTEGISNPVVRKSIHEVKKHLMEYIRQFGNPPDRVVIELAREARQSEKVISKRIQKNKAINALKKEISETHNLNDPGTTSTQRERAIQRVRLCRQQRENCAYSDATITDVMAVDGSGLEVDHIVPRSKGGNNGMNNLVLCYATANQGKGNRTPIDWLSKEDFRQLELRFKHLEGSKKDKSTITKDNVDMLDNAKWKNLHRKTPKEGFTEEQLCSTAYAATQTTDWINKVLYGSRDRSKRYVFASSGAYTGILRRDWGLFFGEDGERSEKGRKIRGDHRHHAVDAAIIAMSTPQHLQEIKKSFIDFEKQNENKNVKPRWNTVEEPWEGFSEQIADEYKKLKVSHRAYNKQIAGYLHKDTIYGPAVVYEKDEKGDVKIDQDGNPKLKKGLYIKSISTIGIKQNHLRMPNGWDKLKEKYKNATTKSEKKTIRKRMLALEDVPPGKSGVIRDIELRDKIRDWLKEHNFSDMAEAKTYIKENSLIINGTPVRKVRVLWKLKEVKEIPRNKFNYETGKIVKDDNYKSLRVYQTQNNHHIEIREKTDKKGVVKWSGEVITNFDAARRVRAEKKAIVDRSENNNGKFIMSLARGEMVHMRHPVTKETNYFVVFKIDSSKSIHFTPHTDANPASSKKEGVKLREDIPLVPDMLRQNMIFYENGMPEKVKISPIGEVKVLERD

SEQ ID NO: 8771 - protein, 1196 aa, synthetic construct
  REGION 1..1196: note = Synthetic
MKLLGLDLGTNSVGSAWIDTDKKIIKMGVGVFPAGVEESEDKRGAPKNQDRRKNRQQRKSICRRSMLKRNLRQYLIKKKWIPTEKTELQEWYNLNPWILRKNAIEKELTEYEFGRVLLHFAQKRGAWWFDEEPEETGDTKKKKKDLSEVPGTVEYTKRKMKEKDAETFGKLIAIEYEARKTDTANNKKRNNRVKNRNNALGDKEMEFVADRHMILDEFLKIWAKQKSFNGELARQLNLPDAQKEIYNKQKTDIWRCQGVLFSQRKAYWNLGTLGRCELEPTDEKCPKADMYAQEFLVLTSVNNIRITPPGQETRKLDTPEREKVITAARKQKTVSESTVRTALGINKGENKALYTLNTDGDKFTVNGDWFYSQIVHDSFGENVWKSFNQNVKDSVNNAILKFEPNEEEDEQKLVAGCKKWWNLDDAQTGKFINVWKKRPKKDTRVNLSRKAIKNLLPYLRDGWSVTEARNMYAEDATNDANNLKRKRYSTKEIAVDKKIRHFLKKHPDMLPPVSDGISNPVVRKSIHEVRKHLMAHIKQFDKPDRVIIELSRKTRQSEKVIAKKMQINKAIDALTKEIIEKHNLNDGTITSTQKEAAIKRIRLCRQQRYVCAYSGVIEDKPYSCAYSGKSITEEQAKTGEGLEMDHIIPRSKGGNNGMSNLVLCYSTTNQGKKDRTPIDWLTEEEFGRLEQRFKHLKDEQDNYITKDNVDMSDKAKWTNLHRRTPKEGFTEEQLSSSAYAATQTTDWINKVLYGSQDRNKRYVFASNGDYTGILRRDWGLFFDEEGNRSEKGKKFRGDHRHHAVDAVVIALAPLFFQKIKESFIDFEKQKENKNIKPQWKTIAEPWEGFSQQVADEYKKLNVSHRAYNRKITGYLHKDSIYGPAIIYDRYQKDNEKKGIKKGELKRDENGNLVLKDGMYIKSIPVIKIEQGHLRMPNDWHSLKEEYKSAMANKKEIKKKMLALEEVPPAKSGIIRDIDLRDKICDWLKDNNFSEMKEAKKYIQENGLVINGTPIRKVRVLWKLNEVVEIPRKSFDYETGEFVKCEDRKSLRVYQTQNNHHIEIRESIKGQWNGDVITNFDAAKRARVDKKTIVDRNDTESGRFIMSLAKGEVVSMRHPATQNANYFVVFKIDSTGTIHFTKHTDANPASTKKKNVPIREDIDLTPQKLQKLGVAPGSVPYKVKISPLGEVRELIRD

SEQ ID NO: 8772 - protein, 1222 aa, synthetic construct
  REGION 1..1222: note = Synthetic
MKLLGLDIGTNSVGSAWVDTDKHLIKIGVGVFPAGVEESEDKRGAPKNQARRSQRQQKRSIDRRAKLKRNLRQYLIKKNWIPTEKVELQKWCNLNPWILRKDALHRELTEYEFGRILLHLAQKRGAWWFDEEPDESEDNNRKKKDLSEMPGTVEYTKRIMKEKNAKTFGELIAIEYESRKTTTAKNKIRNERVRNRTNAFGEKESEFVADRHMILAEFLEIWEKQKGFNGNFSKQLTDEVRKEIYNPQKTNTWRCQGVLFSQRKAYWNLGTLGRCDLEPTDEKCPKADMYAQEFLVLTSVNNIRITPPGQVTRKLDVPERKEVIIAARKQKTVSESTVRTALKINKGENKTLYTLNTDGDKFTVNGDWFYSQIVCDIFGEDTWKAFNQNMKDSVNNAILKFDPNEDDDEKKLRAGCKKWWSLNNEQIENFISVWKKRPKKDTRVNLSRRAIKNLLPYLRDGWSVTEARNMYAEDASNGADSLTRKRYSTKEIVVDKRIRHFQEKHPGLLPPVSDGISNPVVRKSIHEVRKHLIEHIRQYGKPDRVVIELSRRSRQSEKVITKKTLRNKAIDGLTKEIIGTHNLDNADISSTQKEAAIKRIRLCRQQREMCAYSGNVITDKMAADGNGLEIDHIVPRSKGGDNSLSNQVLCYSSANQGKGSRTPIDWLSEEEFGRLEQRFKHLKQNQDSYITKDNVDMADESKWENLHRKTPEEGFTEEQLCSSAYAATQTTDWINKVLYGSEDRSKRYVFASNGDYTGILRRDWGLFFDEQGERSEKGRKLRGDHRHHAIDAVVIALTPQFLPKLKESFIDFEKQKENKNVKPQWKTIEQPWEGFSQQVAEEYKKLKVSHRAYNRKITGYLHKDSIYGPAMIYERHKKDNEKKGIKKGDIKIDENRNRILMEGMYIKSIPVIKINQNHLRMPEDWDKLKEECRNATTNKRAIRRKMLALEDVPPAKSGIIRDIELRDKIRDWLKEHNFLDMEKAKGYIKENGLIINGTPLRKVRILWKLNEVREIERKSFDYETGKFVKCKERKSVRVYQTQNNHHIEIRENKKEKWIGEVITNFDAAKINSDRLKAIKEAGVPSIYEMRKLKKANPEHYQQTREQYRPVISKINKEHAIVNCKDTENGKFIMSLAKGEMVYMRDPETQNANYFVVFEIEASAAIHFTLHTDANPASSKKTTIRKDIKLKPSDLQELGVAPGSVPYKVHISPLGEVKELIRD

SEQ ID NO: 8773 - protein, 1273 aa, synthetic construct
  REGION 1..1273: note = Synthetic
MKILGLDLGIGSVGWCLIEIDEENHPLLIHAIGSRILSISPTESDNFCKGKGETVCSQRTFMRTARKGLDRYQMRRKILSLELAKLGMISSDNSLLTLSPLQTWQLRADAATTGKRLSLAEIGRVLLMLNQRRGYRHSKSDDSDSSQKSYVTDVNQRYSDLNGMTPGQFFATKLKESETTSSAGKNVYDYRIKGYVLPRKAYEEEFYRIMEVQGEFYPEILNDATVKKLHDIIFYQRPLKSCKRLVSVCEFESLKFINKTNGKEVITGPKVAPRTSPIAQETRLWETVNNIRLKNFSNKKRVRKDSQPGLFDEEMSQSKDFRLLQYEYIPNQEERTRIFNFLNTNEKLTQTQLLKILGLKASDGFRWEGAPKNGLEGNRTYTQLKEALGDLAESMPDILRFNIEYENTDIVDQDTGEIISRVKMNRRNSATGKNDGEIYPQYQDEPLYRLWHTVYSSSSKEELSKAIEKQFGITDKEVIDRLYKIDFVKPGYSNRSAKFMRKLLPYLKDGYLYSEACTFVGVNHSDSLTKEENERRVLKKHIDNIEKGELRQPVVEKILNQMINIVNALIEKYGEIDEIRVELARELKQSKDQRAETTSNIAKRERENAAIAIKIKEQGLVASRRNIQKYRLWEESGHRCIYCGKTLSLGEFLGGHGGEIEHIVPRSILFDDSMTNKACSCSHCNKEKNNRTAYDYMSGKSEADFNRYVANIDTLLKEKKISRTKHDRFMMSQSEIPQDFLDRDLRQSQYIAKKAREILFEVCRNVYATSGSVTDFLRHTWGYDNILHNLNIKRYEQADLVEEVSYEHEGQTHKELRIKDWSKRLDHRHHAVDALVIALTRQGYIQRLSNLNTQRDKMYADIQGQSNEFKEKFHLLEKWAELLPHFPVNIAADTIDSIAVSIKSGKKLSTPGKRYIYRNGKRKLVQDNILVPRGALHQETVFGKIKLQDNGKDLKYAFSNPELIADDDIRNLVINRIQEADGDFKKALKALKRSPLIIAKNGKEKEITSIDCYKETFVTRADLSALTAPGIQRIVDKSIREAALDRLAECKNDIKKYQQSFEENPIYIGNDVRHPVKRVRIFSNDNLVPIRKDSTGKAVAFASSGNNHHVAFYEKDGKVTEVIVSAWTGMKRKLIGLPVIIKDPDEAWTRLIDMRESDDVREVADTLPPVGSRFLYSLKIGDMCLLGLTPEQLSDALDMNDMKTLTAHLYRVQTLSTGDYRFRLHTWTNVDAKNARPDTEMKALYRIRSYNAITLSNLIPVSVDNLGQIKILK

SEQ ID NO: 8774 - protein, 1248 aa, synthetic construct
  REGION 1..1248: note = Synthetic
MEKALNDNIRVILGLDLGVGSIGWALIEVDESDKPVRIVDAGVRIVPLTTDQSDGFVKGNGKSVNQGRTECRTIRKGYDRYQLRRADLKEAISGLGMDYGPELVALPPLTLWKLRADAATPGCRLALSEIGRVLMHINQKRGYKHAKSDLGDRKQTEYVTSVNKRYKDIQDAGMTVGQAIYARLEASAVTGENGKVQCTYRAKGEVFPRAAYEAEFDAVMKAQQPFYKDVLTDEAIARLRNIIFYQRPLKSCKHLVSMCDFEKRPYVNAQGDIVYSGTKVAPRTSPLAQLCAIWESVNNIVLKSRRNTSTGTLFDTAAEGRYELSIDEKRDIVAFMNTHEKLTVTELLKILGLSKKHGYSAGEAVGKGLKGNTTYCRLKKALGNYSGAEDLLRFDVHNVDSGKVDEETGEIILETSNDLMEQPLYKLWHTVYSINDKEELRAALAKKFGIDDDEVVERLYAIDFTKDGFANKSARFMRRLLPYLQQGLMYSEACTYINVNHSNSLTSEEKLRRELKNRLEPLKKNELRQPVVEKILNQMINLVNAVFDRYGHVDEVRVELARELKRSKDERNKMWSDNTKRERENKQYAERILENSIAPSKNRIKKYRMWEESGKLCMYCGKTVNFKEFGEGNGAEIEHILPKSVFFDNSFSNVVCACRKCNQDKGNMTAFDYVKKMLPDKFDSYVARVEELYENHKISKTKHDRLLMSQTDIPEDFLNRDLRETQYISKKAKELLLSVVRDVSVTTGSVTDFFRHVWGYDEILHDLNLEIYKMSDRTQMMEYIHNGQRHVEERITDWSKRLDHRHHAIDALTVALMKPAYINRLNRLNTERDRMYEELKKQSPEYQRKHSLLEDWSARQPHFTVREVVEAVKRIAVSLKAGKKVVTPGKRLVYKNGKRVVKQTGILVPRGPLTKESVYGKIKVLERNRPLKQLLLSPEEIADTAVREKVMEVLGLYGNDAKKALAYIRKHPVVVNGREVTAADCYVERFVIKTDITALKCKDVESIVDEGVKRAVRARMAECGNNDSAFQKSLVDRPVCVDKNNRYPVYAVRLFDNWGPNSIAPVKKDSSGKTIGYAAKQNNHHVALYKSYDDKMHEIVLPFWDAVLRKRYGLPVVVEKPDEVWDDIAGRCEDIPDDVLSTLPQPGWKLFMTMQLNEMFVLGLSDAEFMAAIKDNNKAVLTAHLYRVQKLGSLYYYFRFHTQTTVDAKNESKDMESKTLFRIQSLGVLLALNPIKVRVNYLGEIIPI

SEQ ID NO: 8775 - protein, 1248 aa, synthetic construct
  REGION 1..1248: note = Synthetic
MEKALNNNIRVILGLDLGVGSIGWALIEVDDADKPVRIVDTGVRVIPLTTEQSDGFVKGNGKSVNQGRTECRTIRKGYDRYQSRRADLKEDISGLGMDYGTELVALPPLTLWKLRADAATPGCRLALPEIGRVLMHINQKRGYKHAKSDLGDRKQTEYVASVNKRYKDIQDAGMTVGQAIYARLEASAVTGENGKVQCTYKAKGEVFPRAAYEAEFDAVMKAQQPFYEDVLTDEAIARLRNIIFYQRPLKSCKHLVSICDFEKRPYVGAQGSIVYSGPKVAPRTSPLAQLCAIWESVNNIVLKSRRNTSTGALFDTEAEGRYELSIDEKRDIVAFMNTHEKLTVTELLKILGLSKKHGFSAGEAVGKGLKGNTTYCRLKKALGNYSGAEDLLRFEVHNVDTGNVDEETGEIILETSNDLMEQPLYKLWHTVYSINDKEELRSALAKKFGIDDDEVVERLYAIDFTKDGFANKSARFMRRLLPYLQQGRMYSEACTYINVNHSNSLTSEEKLRRELKNRLEPLKKNELRQPVVEKILNQMINLVNAVFDRYGHVDEVRVELARELKRSKDERNKMWSDNTKRERENKQYAERILENSIAPSKNRIKKYRMWEESGKLCMYCGQPVNFKEFGEGNGAEIEHILPKSVFFDNSFSNLVCACRKCNQDKGNMTAFDYVKKMLPDKFDSYVEKVEELYENHKISKTKHDRLLMSHTDIPEDFLNRDLRETQYISKKAKELLFSVVRDVTVTTGSVTDFFRHVWGYDEILHNLNLEIYKRSDRTQMMEYIHNGQRHVEERITDWSKRLDHRHHAIDALTVALMKPAYINRLNRLNTERDRMYEELKEQSPEYRRKHSLLEDWSARQPHFSVNEVMEAVKRIAVSLKAGKKVVTPGKRLVYKNGKRVVKQTGILVPRGALTKESVYGKIKVLERNRPLKQLLISPEEIVDAAVRDIIIDALKQNGNDQKKTLNYLKKHPVVVNGREVKAADCYTERFVIKTDIKTLKCKDVESIVDEGVKRAVRRRMEECGNNDSAFQKSLVDRPVYVDKNNRYPVYTVRLFDSWRADAVAPVRKDLSGRPIGYAAKRNNHHVALYKSSGGEIHEIVVPFWDAVLRCRYNLPIVIETPDDVWDDIAGRSDEIPEEVLATLPQPGWKLFMSMQQNEMFILGLTDEEFMDAISEDNKALLTAHLYRVQKLATVNYYFRLHTQTTVDAKNELVDKESRMLYVVQSMKTLSLLNPIKVRINYLGEIIPI

SEQ ID NO: 8776 - protein, 1247 aa, synthetic construct
  REGION 1..1247: note = Synthetic
MRVLGLDLGVGSVGWCLIEVDGKYNPIEILGMGSRILSLTPDESSNFDRGNGESVCAQRTFRRTARKMLCRYKMRRCLLRSQLAFLGMLDSADSLNSLSPLELWKLRSDAATSGVGLTLPEIGRVLLHLNQKRGYKHAKTDVADAKQTEFVQGVNRNYAEIHAEGKTYGQHFYERLLATAATTDKGAKVATFRIRENVFPRQAYEDEFDTIMRVQRKFYPEILTDEVIAGLRNAIFFQRPLKSCKHLVSVCEFEGKNYRTADGREVFGGPKVAPRTSPLAQVCRLYEVINNIRLVNVRNKDAAPIPDGIVSSEARKSQYQFVFTAEERERIYEFLNTHEKMTVTDLLKLIGLKRGDGFRPDQSLGKGIPGNKTYTALFNALEGVDRRDELLRFNLRFIDWNADSATGDMRRVVSPDFINEPLYRLWHTAYSIADRDELAAALAKNFGITDPAVVDRIFAIDFTGAGFSNRSARFMRRIIPYLTEGMVYSDAAAAAGVNHSASVTAEENAARVLVDHLDIIKKGSLRQPVIEKILNQMIHVVNSLIAQFGPIDEVRVELARSLKQSAKERSDASTAINAREKENKALGEKIAEYGLTPSRRTIQKLRLWEETEHVCMYCGQPVSATEFLTGDAEVEHIIPRSIFFDDSLSNKTCACRRCNKAKNNRTAYDFMKEDHTDEEFRAYIARVEAMAEAKKISRTKRDRLLCPKEEIPSDFLERDLRQSQYIARKAMEILHTVVRNVWATSGSVTDFFRHQWGYNRILHDLSLDKYALAGLVEEVEYEHKGQTHRRQQIKNWSKRFDHRHHAVDALVIALTRQGYVQRLNNLNAEHGNIHAELVKENADFTRNKSQLELWASTRPRFDIETVRKAVEGIAVSFKSGKKLTTPGKRAIMRGGKKTVVQDKLVIPRGALHQETVYGLIRLPDGRKTLKYAFDTPTLVSDPAARKAIQAILEHFGGNVKKALKSLPGEGLEVMRKGKRENVTEVSCHRFEYVVRKSVAALKYKDILKIVDGAVRRSVEVRFAECGNKDSEYQKSLAERPLILPGAFTPIRTVRIATGLKPKSMAAVRRDSSGNPIGYAKTASNHHIAIYEDSVGRKLCSVTSMWDGVLRRLNGIPVIVKHPDDAWNLLMDIADEDVRERLAASLPRPDWKFLMSLQMNQMFVLGLSEDEFNDAVRNNDRATLAAHLYRVQKLADNDFFLRRHTNTTADDTTEFRKMLDVYRLSTQAFLNLNPHKVKITPTGDFAYD

SEQ ID NO: 8777 - protein, 954 aa, synthetic construct
  REGION 1..954: note = Synthetic
LVNVRNKDAAPIPDGIVSSEARKSQYQFVFTAEERERIYEFLNTHEKMTVTDLLKLIGLKRGDGFRPDQSLGKGIPGNKTYTALFNALEGVDRRDELLRFNLRFIDWNADPATGDMRRVVSPDFINEPLYRLWHTAYSIADRDELAAALANNFGITDPAVVDRIFAIDFTGAGFSNRSARFMRRIIPYLTEGMVYSDAAAAAGVNHSASVTAEENAARVLVDHLDIIKKGSLRQPVIEKILNQMIHVVNSLIAQFGPIDEVRVELARSLKQSAKERSDASTAINAREKENKALGEKIAEYGLTPSRRTIQKLRLWEETEHVCMYCGQPVSATEFLTGDAEVEHIIPRSIFFDDSLSNKTCACRRCNKAKNNRTAYDFMKEDHTDEEFRAYIARVEAMAEAKKISRTKRDRLLCPKEEIPSDFLERDLRQSQYIARKAMEILHTVVRNVWATSGSVTDFFRHQWGYDRILHDLSLDKYALAGLVEEVEYEHKGQTHRRQQIKNWSKRFDHRHHAVDALVIALTRQGYVQRLNNLNAEHGNIHAELVKENADFTRNKSQLELWASTRPRFDIETVRKAVEGIAVSFKSGKKLTTPGKRAIMRGGKKTVVQDKLVIPRGALHQETVYGLIRLPDGRKTLKYAFDTPTLVSDPAARKAIQAILEHFGGNVKKALKSLPGEGLEVMRKGKRENVTEVSCHRFEYVVRKNVAALKYKDILKIVDGAVRRSVEGRFAECGNKDSEYQKSLAERPLILPGAFTPIRTVRIATGLKPKSMAAVCRDSSGNPIGYAKTASNHHIAIYEDSVGRKLCSVTSMWDGVLRRLNGIPVIVKHPDDAWNLLMDIADEDVRERLAASLPRPDWKFLMSLQMNQMFVLGLSEDEFNDAVRNNDRATLASHLYRVQKLADNDFSLRRHTNTTADDTTEFRKMLDVYRLSTQAFLNLKPHKVKITPTGDFAYD

SEQ ID NO: 8778 - protein, 1257 aa, synthetic construct
  REGION 1..1257: note = Synthetic
MKILGLDLGVGSIGWALIETDTNDNLLDITGIGCRIVPLTPDETNGFTSGNGKTKCQERTVARTIRKGMDRYQMRREQLSEALKRLQILDPQHTLTNLPPLELWGLRAKAASEKVTLKELGRVLMHINQKRGYKHAKSDMGDSSKSDYVARVNQNFADILAENMTVGQHFYHKLKDSKAIGSKGGEFVSFRIKENVFPRKAYEQELDTIMQVQQASYPDILTDAIVAELKNIIFYQRPLKSCKHLVSICEFEKREFKNREGKPVTVGPKVAPRTSPLAHTTAIWEAVNNIRLSNPHNRNKATELTGSLFDKGNQLPRQARLLQRDFLLTPEEKRTVFDFLNIHEKLTVTDLLKLLGLKKADGFKPDKAVGKGIKGNTTFVALEKALEGMPDAEKHLQFDLSLTEKVDPETGEIVQVIDPAYTQQPLYRLWHTVYSVSDKDELAKALEKIGITDPDIVERLYALDFVKPGYSNRSAKFMRRILPHLMQGHDYFESCQAIGINHSGSITTVENDSRPLLDHLENLKKNELRQPVVEKILNQMINVVNGIVEEFGPIDEIRIELARELRKTKEQRASMTSNLSKRERENKGIAEKITEMNINASRTRIQKYRLWEETGHVCMYCGQTVPASQFLEGNGAEIEHIIPRSLLFDDSFANRTCACRDCNKEKGNMTAYDFMNTKSDDEFTKYVKRVEDLFSRKIISKTKRDRLLTPGNEIPADFLNRDLTLSQYIAKKAHEILRGIARNVWSTTGSVTDFFRHAWGYDEILHDLNIDRYRLGGRVGLVQYEHNGQTHQRERITDWTKRLDHRHHAIDALTIALTRQSFIQRLNNLNSQRGNIHVELMEQTDELRKGRSLLEEWARTRPHFPVSEVTAKVSEIAISLKSGKKLTTPGKRYVIKNGRRKLVQSQILVPRGALHEQSIYGKIKLPTEKVTVKKSFEAVDRIYNSKIQSAVRARIEQHAGDLKKAVKSLNTQPLTVMSRNGTPTEITTVTLLANHYVLRYKVETLKYKDLSSIIDKAAREAIETRFAECGNDDKKYQKSFADGNCIVSPCTGMPIKTVRCLTGLKEQSVVAVRKDVSGNCIGYAKTGGNNHVAFYQNAKGKVDSLVTSTWIATKRKRLGVPVVITDPASAWDYLAELPEIDDVREVAMSMPERDSTFIMDMRMGDMFILGMTDEEYRDAIATGDKATLLRHLYRVQKLAINSYYFRLHTESTLGKDERIDISMKALIRAKSFNALISLHPRKVKIDHIGKLIMYKPI

SEQ ID NO: 8779 - protein, 1261 aa, synthetic construct
  REGION 1..1261: note = Synthetic
MRILGLDLGIGSVGWALIETDDNYIPIRILGMGSRILNLTPDEISGFERGKGESICAQRTLKRTARKGYNRYQQRRSLLRTLLDAAGMLPSEDQMLHMPPLRLWGLRADAANDDSHISLTELGRVLLHINQKRGYRHSRAEVASGDKKQTDYVEAVERRHKEIREAGKTVGQFFYDKLLESKYVLSNGTETVNFRIKNEVLPRRAYQEEFDRIMEVKRKRFPDVLTENLIELLRNAIFYQRPLKSCKHLVSLCEFESHKYSTADGREVNGGPKVAPRTSPLSQIVRIWEVINNIVLKNSANKSRKDNPLVGDQFKEASEPKAARLLEYEYRPDAEERQRIFDYLQTNDKMSFTALLKLLGLKKSDGFTLDKGSESIFKGNSTLTSLRKALSEIPNAEELTQFNLSTEIETKVDKSTGEVSSTHEVISPDYIHQPLYRLWHLLYSIADKDELAKALEKQFGITDVATVDALYAIDFRAPGYSNRSARFMRRILPGLMAGKMYSEACEEIGINHSSSLTKEENENRELTGHLKLLPKGSLRQPVVEKILNQMINVVNALIDEYGEIDEARVELARQLRQSASQRAEASSAISKREKDNKVIADKIAEYGLKVSRNRIQKYRMWEETGHVCMYCGQPVGVKEFLESNGAEVEHIIPRSLYFDDSFANKTCACRRCNREKKNSTGYDFMKSKSEKEFESYLSRVDSFFKDKRIGKKKRDYLLMKKEEIPLDFINRDLGLTQYISRKAREILTEAIRTVNASSGTVTDFFRHSWGYDNILHELNVERYSQGEMTEMTEFEHKGQIHSELRIKDWTKRLDHRHHAIDALTIALTRQAYIQRLNNLSANKDDLLGMEILETGHDLKRERRLVQWAETRPHFSVEDVRKHVAEIAVSQKSGKKLTVPGKRRIRRGRKNVIVQSGLAIPRGMLHKETIYGRILMPDGEKKVKDVFEDPTLIVNAKVRSLVEERLAAHGGDTVTAVKSLKKNPLKLTTRHGIVEVKSVKCNKRVFVVKTPVEGLRPVDIPSIIDSHVRTLVAERYAEVGNDQKKFQSSLTERPLYFNNSQSPIKSVRCTTGLAEASMVAPRRDSDGKVTGYALSGNNDHVAIYEDENGKIKTQVVNFWTAVKRKNAGLPIIITDPQLGWDRLMEIPDEEIREELSKSLPQPNWKFLQSLRMNETYILGLTDEEFSDAMASGDNALLLSHLYKVTGVSDNDYNFRLHTDTTSIKDKPYLSAGLYRRLTSFKAIADQNPKKVRVSVIGELTYD

SEQ ID NO: 8780 - protein, 1058 aa, synthetic construct
  REGION 1..1058: note = Synthetic
MKVLGLDLGVGSVGWCLIEVDGKYNPIEILGMGSRILSLTPDESSNFDRGNGESVCAQRTFRRTARKMLCRYKMRRCLLRSQLAFLGMLDSADSLNSLSPLELWKLRSDAATSGVRLTLPEIGRVLLHLNQKRGYKHAKTDVADAKQTEFVQGVNRNYVEIHAEGKTYGQHFYERLLATAATTDKGAKVATFRIRENVFPRQAYEDEFDTIMRVQRKFYPEILTDEVIAGLRNAIFFQRPLKSCKHLVSVCEFEGKNYRTADGREVFGGPKVAPRTSPLAQVCRLYEVINNIRLVNVRNKDAAPIPDGIVSSEARKSQYQFVFTAEERERIYEFLNTHEKMTVTDLLKLIGLKRGDGFRPDQSLGKGIPGNKTYTALFNALEGVDRRDELLRFNLRFIDWNADSATGDMRRVVSPDFINEPLYRLWHTAYSIADRDELAAALAKNFGITDPAVVDRIFAIDFTGAGFSNRSARFMRRIIPYLTEGMVYSDAAAAAGVNHSASVTAEENAARVLVDHLDIIKKGSLRQPVIEKILNQMIHVVNSLIAQFGPIDEVRVELARSLKQSAKERSDASTAINAREKENKALGEKIAEYGLMPSRRTIQKLRLWEETEHVCMYCGQPVSATEFLTGDAEVEHIIPRSIFFDDSLSNKTCACRRCNKAKNNRTAYDFMKEDHTDEEFRAYIARVEAMAEAKKISRTKRDRLLCPKEEIPSDFLERDLRQSQYIARKAMEILHTVVRNVWATSGSVTDFFRHQWGYDRILHDLSLDKYALAGLVEEVEYEHKGQTHRRQQIKNWSKRFDHRHHAVDALVIALTRQGYVQRLNNLNAEHGNIHAELVKENADFTRNKSQLELWASTRPRFDIETVRKAVEGIAVSFKSGKKLTTPGKRAIMRGGKKTVVQDKLVIPRGALHQETVYGLIRLPDGRKTLKYAFDTPTLVSDPAARKAIQAILEHFGGNVKKALKSLPGEGLEVMRKGKRENVTEVSCHRFEYVVRKNVAALKYKDILKIVDGAVRRSVEGRFAECGNKDSDIRRVSRNGPSYFRARLLLYVLCGLPQA

SEQ ID NO: 8781 - protein, 825 aa, synthetic construct
  REGION 1..825: note = Synthetic
MKIAAFDIGISSIGWCLCEQNDKEYKVIDCGVRIFTAAEHRKTGDSLAAPRREARLSRRRLYRRRTRLAELRNLLCTEFGLDKKIFEMQGANLPQIYKTSKEILSPWELRVKALDLKVDINELVRIILHIAKHRGYANLINNNEKDKGKVLSAIAQNQEDIKSYLSGAQMLVERYFNKEIKSGLYESIRNKTDSYKNSLSQSLTKAELELILNTQEKLGYKFSPKFKEKVLDIAYFRRPLKDFSDKIGNCVFFEDEKRAPKFAIDSLEFVAISRIINELKAISNDTGLVFDVKDVIEKTLNEARKIKKFTYAKFRKILFLDEKITFKSLRYIKNNPENSEFINLGGFVELSKIIGDNFTRDEFNKIALYVTLSKDTNLLRQKLREIGLDKFDDETLNSILNLKYAHFINLSFKALQKILPYMKDGFRYDEACIQAGLSIKSNLNKSDFLPPFIDTPYSDQLTNPVVSRAVREYRKVVNSIVKKHGKFHKIHIELAREIGKTFEERKKIETEQANNHKLNNEAMIFCQEIGLNPYSNQNILKIKLWREQQEICMYSGKKISINDILSNLVEIDHILPYSRSFDDSMSNKVLVFAKFNQEKKNQTPYEAFGDKDFWNDIVLRAKSLNNSSKFKKLTTANFVNKKDGSDFIQRNLNDTRYISRLVVNYTRDYLNFLDFDDGKKEHLLCVNGSLTSMLRHYWGFGDKDRNGHIHHFVDAAILSACSPSVIKAFSDFKKTEEINNAKYYADKISGLRIKSKFDPFINFRSIVLDAAKNIFVSKPPRKKVTGALHQETIISKDDILKEQKYGSELGLNRALNLGKIRQINY

SEQ ID NO: 8782 - protein, 813 aa, synthetic construct
  REGION 1..813: note = Synthetic
IRNKTDSYKNSLSQSLTKAELELILNTQEKLGYKFSPKFKEKVLDIAYFRRPLKDFSDKIGNCVFFEDEKRAPKFAIDSLEFVAISRIINELKAISNDTGLVFDVKDVIEKTLNEARKIKKFTYAKFRKILFLDEKITFKSLRYIKNNPENSEFINLGGFVELSKIIGDNFTRDEFNKIALYATLSKDTNLLRQKLREIGLDKFDDETLNSILNLKYAHFINLSFKALQKILPYMKDGFRYDEACIQAGLSIKSNLNKSDFLPPFIDTPYSDQLTNPVVSRAVREYRKVVNSIVKKHGKFHKIHIELAREIGKTFEERKKIETEQANNHKLNNEAMIFCQEIGLNPYSNQNILKIKLWREQQEICMYSGKKISINDILSNLVEIDHILPYSRSFDDSMSNKVLVFAKFNQEKKNQTPYEAFSDKDFWNDIVLRAKSLNNSSKFKKLTTANFVNKKDGSDFIQRNLNDTRYISRLVVNYTRDYLNFLDFDDGKKEHLLCVNGSLTSMLRHYWGFGDKDRNGHIHHFVDAAILSACSPSVIKAFSDFKKTEEINNAKYYADKISGLRIKSKFDPFINFRSIVLDAAKNIFVSKPPRKKVTGALHQETIISKDDILKEQKYGSELGLNRALNLGKIRQINYGYVDNAEMPRVDIFADRKNGKFYGVPIYTMDFALGILPNKACVKGKDNQGNIKDWLEMDENYEFKFSLFKDDLIRIQKSGMSEAVVCYYNSFNVSSCSISVEKHNADAKDLSDNEKLLYPSSKNKRKKDDLDDASPATYEAIQPSLGIQSLLKFEKLIVSPLGGSVSLNSSLEQM

SEQ ID NO: 8783 - protein, 560 aa, synthetic construct
  REGION 1..560: note = Synthetic
IDTPYSDQLTNPVVSRAVREYRKVVNSIVKKHGKFHKIHIELAREIGKTFEERKKIETEQANNHKLNNEAMIFCQEIGLNPYSNQNILKIKLWREQQEICMYSGKKISINDILSNLVEIDHILPYSRSFDDSMSNKVLVFAKFNQEKKNQTPYEAFSDKDFWNDIVLRAKSLNNSSKFKKLTTANFVNKKDGSDFIQRNLNDTRYISRLVVNYTRDYLNFLDFDDGKKEHLLCVNGSLTSMLRHYWGFGDKDRNGHIHHFVDAAILSACSPSVIKAFSDFKKTEEINNAKYYADKISGLRIKSKFDPFINFRSIVLDAAKNIFVSKPPRKKVTGALHQETIISKDDILKEQKYGSELGLNRALNLGKIRQINYGYVDNAEMPRVDIFADRKNGKFYGVPIYTMDFALGILPNKACVKGKDNQGNIKDWLEMDENYEFKFSLFKDDLIRIQKSGMSEAVVCYYNSFNVSSCSISVEKHNADAKDLSDNEKLLYPSSKNKRKKDDLDDASPATYEAIQPSLGIQSLLKFEKLIVSPLGEISEFKFEPRADVRLKTSKKTNNV

SEQ ID NO: 8784 - protein, 1053 aa, synthetic construct
  REGION 1..1053: note = Synthetic
MSRGANAQEKQGMTQQFDKTILGIDLGANSIGWSLVGFKNDRPAGIVGMGVRIFQAGSDGNIEEGRDESRAVQRRDARQRRRQTKRQSWRMMSLARALQKHGLLPEGDVKTGKARHDLLEQLDQDLRNAFIAQGIPANTSEGLREFPYFLRARALDHPLEPFAFGRALYHLAQRRGFLSNRKSDRDEKELGVVKQSISDLEQAMNACGVRTLGEFFHRLDPVIEKRIRKRWTARSMYDAEFEKIWAAQAQHNAALSNADTKKHVHDLIFNQRPLKSQTGLVGPCELEPKKKRAPKAILPAQRFRILQKVNDLRLCLDDGTARELTPEERKLLADHMDAVREVTFPGLRKLLGIKKSENVEFNLERGGEKKLKGNTTAAPLRDVFGDRWDSLSRDEKNAIIGELMGIDSSETIKRRGREVWGLSADKAEELAKVHLEPGYAALSREALAKMLPFMEQGVPFKTAEDQVYGQSAWVKNTCSRLMPVAEAGIAVRNPVVMRCLTELRKVVNAVLRKYGKPGEIHIELARELKKSREDRMRISKDNRKRQDSRETGYERIQKETGIPNPKRDDIEKYQLAVECAWTCPYTGKGIGFENLFGEHSQFDVEHIIPFSRCLDDSFMNKTLCYHEENRHVKRNRTPWESYEHSDRWDEIIGRVQRFNGDAARQKLERFQTRDVRDFEEVSSTKLNDTRYASKLAARYLGWLYGPEYRSRIQTNTGQITAYLRNAWRLNRILGEGDTKTRDDHRHHAVDALVIALTTRSAVKQLSDAAQKQHLLKGRARGFGKLVEQPWDSFLEDTRAAVESILVSHRVDHRVSGRLHEDTFYSRPRTDENGKNYHVVRKPLGDMFSEADIDQIVDLAVRDAVREHFEGNGRNAKKAFGDPANHPVLRNDGGSTPIHRVRIRKSITAFPVGEDKDPRFVTTDSNHHMEIIERKDRKGRISWDGVMVDRFVAVQRVRLGQPVVATNHGPDARLVCTLSPGDLFCMSAGDSRAYYVARTISGVNIEFVRINDSRKKKDIKDGGQWVKRSIDALRNLGFEKIVVSPLGEPIIAHD

SEQ ID NO: 8785 - protein, 1036 aa, synthetic construct
  REGION 1..1036: note = Synthetic
MGGVTEKTVLGLDLGANSVGWALVGYEDGEPAQIVDMGVRIFEAGTDGDIASGRDESRAVERRGARMRRRQTKRQSTRMTELARTLQRFGLLPPGELRKGADRHAFFLDLDNRLRAAFAAQGFAVDQSDGLREFPYFLRARALDAPLEPHALGRALYHLAIRRGFQSNRKSDKEEKELGIVKASISHLEQSMRDTGARTLGEYFHQIDPSLERIRKRWTARTMYEDEFKQILDAQARMDALTLSPEDLKTLEYRIFYQRPLKSQKGLVGRCELESNKRRAPVALFSAQRFRILQKVNDLRLHYLDGTERGLTEEEKKTLAAFMDVHDEVSFPGMRKALKLPKNVDFNLERGGEKKLKGNVTNARLLKVFGDRWNTLGDAEKQAIVGEILGIEDFMTLARRGLAWGLGAAEVEAFAKIHLEQGYSALSREALKKLLPLMEEGVPFKTAEDRVYGNRLLGKEARSKLDPVVVALPSIRNPVVMRTLTEMRKVVNAIIAKHGKPDEIHLELARDLKKTREARARHSRDIRGREQTRTDARESIQTKLGQQKISRQDIEKVLLAEECGWVCPYTGHSINMSNLLGEHPQFDIEHIIPFSRCLDDSFMNKTLCYHEENRLRKGNSTPWEAYGGDEKRWEEIIARVERFSGDARRRKLERFQSRDIEDYEGFAAQQLNDTRYASKLAARYAGMLYGQDALKQVQTNSGQITALLRDALHINGLLGGGDKKTRDDHRHHAVDALVIALTNRAAVKRLSDAAKRQKLEKGRIQGFLKNALLPWDTFPADAQSAVDSIIISHRVNHKVQGRLHEDTFYSAPRKDENGRLYHVVRKPLDGNFKPSDVQGIEDPAVREAVRAHLAAHGNDPKKAFADPANAPRLPGANGPVPIHRARIRRACTTFQIGGNDYARFVTADSNHHMEIVEETRNGKTRWTGVMVDRLQAVSRKKRGEDVVQKDHGEGKKLVCTITSGDTFFLSSDNRYYIARTIWGQNVEFVSVFEARKKADIKASPGNWNVRSVNVLRDLGFVKVTVSPIGEATPCHD

SEQ ID NO: 8786 - protein, 1059 aa, synthetic construct
  REGION 1..1059: note = Synthetic
MGTQKTMQVLGLDLGANSVGWALLEVQGDEPCGLLDAGVRVFEAGTTGDIEGGRDEPRGVERRQARQARRQAERRSRRMANIAAMLRRHGMFPECTTHKGAARDKAIAQLDKELQAEYRARCAGDPEALRRLEQLPYFLRARALDEAVSPAAFGRALYHLAQRRGFLSNRKTKRDAKEEGDVKTSIRTLLTRMQETGARTLGEYLSRIDPAEEERLRRRWTARGMYEAEFEALWNAQKGHHPGLLSEELKRRVYDAFFSQRPLKSQKGLIGFCELEPGRRRAPRALLTAQRFRLLQKVNDLRVHMPDGQIVDLTAEQKRAVADKLQGVEKQTFDQLRKLLKLSGVEFNFERGGEKGIPGNVTAAALRKVFKKKWETLSEAQQMAVVGEVMGITCDETLLRRGREVWGLDEEGAEALTHVHLEEGYAALSREALKRILPLMEQGIPFATAKLQAYDEKWAKNVLDGLPAVELAALPIRNPVVMRTLTETRKVVNAIIRKHGKPAVVRIELARELKKTRDARKRITKENHERRANRASLVETHFRESRSATRADIEKLLLWEECNRQCPYTGKPISFEALFGDAPQFDVEHIIPFSRCLDDSFMNKTLCHHEFNRNVKGNRTPYEAAGHNEDAWNQMSLRVRQFRGDGAKGKIERFLAQDLKAFDEIVSQKLNDTRYASRIAAQYLAWLYGDEARSRIQVSTGQVTAYLRDAWRLNSILGDGGEKERGDHRHHAVDAVAIALTSRSIVKRMSDSAQRRMEERGRSRGWWNDLPMPWDSFLEDVKEKVGRIVVSHRVSRRVRGQLHDDTVYSAPRKDKEGKEYVAFRKPLTEAFKAEAVEKIVDPRVREAVREWLEKHGNDPKKAFGDPANHPRLMIKHGPHAGRTVPIHSVRLMENRGVESIGQAPHDRYVWARSNSHIEIFGVLDGDGEITKWKGRVVSRLEAYRRLKGKKPIVDRDGGPMTKFLFSLTQGDTIEVDMESPERDVLRLVYVVRGVWEEGGKARIESVHVTDARKKQDIPRSRSEKEWARFRWTPFAERLRKSDCKKISLTPLGEVVTAND

SEQ ID NO: 8787 - protein, 1106 aa, synthetic construct
  REGION 1..1106: note = Synthetic
MIPRKESPYYDLTGITAQVYYLYSVYTWACCLSRLFSPVSGERKGGLMASVGEQLVLGLDLGSNSVGWALLRESEDGPTALVDAGVRVFEAGTEGDVESGKDEPRGMQRRMARQRRRQAERRSRRMENLACILRRSGLLPDDVVRHGAKRDAAFRGLDQGIYVRHRAVLGEDSPELGALRQLPYFLRSRALDAPLERHELGRALYHLAQRRGYLSNRKARKKDDDSGEVEPAIHALQAEMDAAGARTLGEYLSRIDPVQEQRIRRRWTARRMYQEEFNAIWEAQRPHHKKVLTDALKEQAYECIFDQRPLKSQKGLVGECDLVRGKRRAPMALLNAQRFRLLQKVNDLEVCFADGTQGPLTPEQRQKVLDGLETVEHIKFPGLRKLLKLKGAEFNFERGGEDRLPGNKTAKRLRDVFAERWDALSRAEQEAIIGEAMGIQKPETLVRRGREVWGLDAEAAERFGKVQLESGYCSLSREALKVILPLMEQSKRFATARDEAFGGQWSRVVNSELAPVVDACSSIRNPVVTRTLTETRRVVNAIIRKYGKPGVIRIELARELKKTREQRKEITRNINKRRDQRGEFAEVVENETGNKNPSRRDVERIQLWTECGGKCPYTGNSISRGQLLSAESPWDVEHIIPFSRCLDDSFLNKTLCYHEENRNVKKNQTPWEAYGGTPAWDDIIMRVSQFHGDAAKEKLRRFQLRDLDDFDTFTQRQLNDTRYASRLAAQYLSWLYGDEARSRIQVSTGQVTACLRNAWNLNKILGDGGQKERSDHRHHAVDAVAIALTERRYVKALSEAAARQFAQKGRSRGFQKLVEQPWDDFLRDVQDVIGRIVVSHRPQRKVAGGLHDDSIYSPPRTDENGKPYVVMRKPLDKDFKASHLEDVVDPEIRRILQDWLERHDNDFKRAFGDPKNHPSIVIKHGPQAGQTIPIHKVRMKFHREVTPIGEGERLRHVWTRGNSHIEIFAFKDANGNVAKWEGRVVTRLDAYRRVKHKRPVVNRTWTENHEFLFSLTQGDVVELDVEPEADRTVREPYLVRGISFQGGGIFELTHIRDARKKGDIPPKVTEEETTFVRRRPYVDGLRKLNCQKVSINPIGEICPAND

SEQ ID NO: 8788 - protein, 710 aa, synthetic construct
  REGION 1..710: note = Synthetic
MGTQKTMQVLGLDLGANSVGWALLEVQGDEPCGLLDAGVRVFEAGTTGDIEGGRDEPRGVERRQARQARRQAERRSRRMANIAAMLRRHGMFPECTTHKGAARDKAIAQLDKELQAEYRARCAGDPEALRRLEQLPYFLRARALDEAVSPAAFGRALYHLAQRRGFLSNRKTKRDAKEEGDVKTSIRTLLTRMQETGARTLGEYLSRIDPAEEERLRRRWTARGMYEAEFEALWNAQKGHHPGLLSEELKRRVYDAFFSQRPLKSQKGLIGFCELEPGRRRAPRALLTAQRFRLLQKVNDLRVHMPDGQIVDLTAEQKRAVADKLQGVEKQTFDQLRKLLKLSGVEFNFERGGEKGIPGNVTAAALRKVFKKKWETLSEAQQMAVVGEVMGITCDETLLRRGREVWGLDEEGAEALTHVHLEEGYAALSREALKRILPLMEQGIPFATAKLQAYDEKWAKNVLDGLPAVELAALPIRNPVVMRTLTETRKVVNAIIRKHGKPAVVRIELARELKKTRDARKRITKENHERRANRASLVETHFRESRSATRADIEKLLLWEECNRQCPYTGKPISFEALFGDAPQFDVEHIIPFSRCLDDSFMNKTLCHHEFNRNVKGNRTPYEAAGHNEDAWNQMSLRVRQFRGDGAKGKIERFLAQDLKAFDEIVSQKLNDTRYASRIAAQYLAWLYGDEARSRIQVSTGQVTAYLRDA

SEQ ID NO: 8789 - protein, 1258 aa, synthetic construct
  REGION 1..1258: note = Synthetic
MGKVLGLDLGTNSIGWAIVEEERGEHKLIDSGVFIFSEGVKIEKGVESSKAAERTSFRLARRQKFRRRLRKYETLKVLIENKMSPLTLEELEKWAKYKKGFKREYPKSKDFLEWLKTDEATNKNPYYFRAMSAKSKLPLYEVGRALYHIAQRRGYKSNRLETTKANEDGKVNSGINEINKNIGTLTLGEYFYELYKKGDKIRSKYTSREQHYLSEFKKICEIQQFSKELSIKLEKAIFFQRPLKSQKGLVGKCVFEKSKPRCPISHPLFEEFRALQFINSIKVINEKRFLNDEEKLMIKPLFLRKSKPNFDFEEIRKRITNKNRDMTLNYTDWTLVSGCPTISQLIEIFGDDWININFEYIREKDNKKSIINYETIWHVLFNFDSVEKIKEFGINRLKLDEDKANKLSKIKLKQGYGSLSLCAIRKILPYLKEGLLYSYSAYFANLGKAVDEKNKNKLSEIKEDIKSLIDVFRNSKKVENIINSYIYKYRENHFSLKIEKEDFIKKLDSELGEDFISLNESERVTFIDEYFSLLEKMIKRNDFIKIKRLDEKIIELLKDKYDIPEQNLTKLFHPSDLDIYPDAKPAPDGKKYLGSPRTQSVRNPMAMKTLHQLKKLINTLIKENKISSNDTINIELTRELNDANMRAAIKRYQNELEKNKKECAQKIKDTLKIEPTETDILKYQLWEEQRHMCLYTGKKINISDFLSDNPIYDIEHTIPRSLSFDDSQVNLTLCHNDFNRNIKKNMIPQQLPNIEEILLRIEHWKEEYQNFEKQINKAKNSSKNSSSKEDKDKAIQWKNYLILKKDYLKQKYDRFLIKDIPSGFTNRQLRDTAIITKYARAYLKTVFDDVNSIKGSMTAQFRKIWGVQNEYDIKSRNKHSHHTVDAIVLASITGPKYNLLSTFYKDAERGLRPTFKKPWATFVEDIKKIEDEIIVKHHFEDKTLKQSKKKLRIRGKIKYPEGNDGKNKPIYMQGDTFRGSLHLDTFYGAIKRKDENNNEKLRYVVRKPVNSLKNEKEIDNIVDEGIRRKIRAVIERRTTDGKSFAEAISETIWMNEEKKIPINKVRYQMTNIANPIILKNHRDKSKDGQEYKENIYVTNDSNYMMGIYEGTIANKPKKDFILVSNFELAKSKNTKLPDEKNGLQLRQKLKRGMMVLLYENSKGEIDSIKDNVKELSKRLYKIIGFSSMTAQKKYEYGRISLRHHLESRASIELKEINISFKNNEEYIPQRMLLHSQFKALIENKDFLITNDGKIKFIF

SEQ ID NO: 8790 - protein, 1056 aa, synthetic construct
  REGION 1..1056: note = Synthetic
MKYRIGLDIGVASVGWAVLENDEHDEASKIVARGVRVFDIPQNQKDGGSLMAERRGFRSMRRTLRRRKVRVGLVKHLCESTFNIAFKGILEQQNLPCIYSIRLDALSRKLEIEEFARLMLHFIHRRGFLSNRKNIEKGSDDGKVLVGIKDNEKVLKEKGYKTIGEYYVKEFISKGLTVRNKSGSYNCTFNRKSIEDEIKLIFRIQRELGFDANLIGENFEIRFLELFNKQIPYDIGPGHPSPYAINSYLDAVGVCEFDGNPRAYQATNAAERFRLWSNLNNLVLVTRTEKTIKDRELTLPEKESIAEYCLHKGGKVTYGMLRKKLGLGEDVRFKHLTYVKRVKTEGRFQVQESEPVEVEKKVFVDLRGRSAVKKVFKDKFGELTDMEIDTIITVLHAYHSEDRLRMAIAGELENGRFTLDPEYTDYVLNIQLPQSKPTHLSTEIIYKILPHLEAGHKYYKAMELAGFNHTTASEVEKKIKLSLKDIEKEIRNPVVLRSVSQTIKVVNAIIDKYGSPQQVIVEVARDLARDFRERQKITRENEENQARNERIKKQIMELGILVPGGEDIVKYKLAQEQNWEDPYDGGRKIDAEKLFEPNYVQVDHIIPYSKSFDDSYANKVLVHAASNQNKGSRTPLQFLTGDRAQMFINWVRSAKISPRKRTNFLTVEPKEDEMKERNLKDTQYITKFIKNFLEKHLYLADSKHGVPIKAIKGGMTAHFRKRLGLNKFRDTDEHHATDAIVVACFTDKLVRQITEFSKRYETIYEKLKFPEPWDGFRDELQALAPVSVSRMPNRKITGPGHKETVRGLVKELDVKGREIYYTITRVPLAKLKLKNGEIEGYYNKESDIGLYNKIKDVLLTNPEKDLEAAFSGFRKPKADGTDGPVVHKVKIKAKTTNFVTLDRVGGVADNGSMVRIDIFAKGDKFYFVPIYTADFYKPQLPNKASVSGKPYVEWLEMDEGLGFEFKFSLYSNDIFHVAEYGFLYYRGADISSARISAAYQDGRVEDGKRIQIRMGIQKLQEFRKMEVSVLGEIKDAPFQPRDVRTLLGPRSKKKEK

SEQ ID NO: 8791 - protein, 998 aa, synthetic construct
  REGION 1..998: note = Synthetic
MSTTRVLGLDIGTSSVGWALIEGRDPDHVRIIAAGVRVFPMGVDEATLESRNIQRRQARLRRRQIERRARRKTKARHILQSHGFLPPGDPSHADPAWASVLALDPYKVRAEGLHRRLQPYEFGRAIYHICQRRGFKSNRKRPLTKKEKGAVHEDIAGLKREMDAAHAETLGEYLNRLDPRQQRRRGRHTNREWYREEFRQLCERQRDFGLPLSPALQKELEETIFSQRKVWWKRGSIGRCSLEPGKQRAARALPVCQRFRMLQRVNDLQIILPDGTTRQLSDEEREKLLARLDWEENLSFKSIRKLLRLPAEARFNLEEGGETKLPGNSTAYRISRAIGKREWERCSPESKAQILEALMSIEDEDLFKRVALRKQWGLNEEQAERLSEVALEEGRLDLSTKAIRKLLPLMEKQRLSYAEAAWRVYGDRGPAQAYESVPPVEDLRNPTVQRSLAETRRIVNAVIRRYGKPDRIHIELARDLKAPKQIRLRRSRQMRRNEAERKSARKELIEQGLPEPTGRDIEKYRLWKECGKRCPYTGKMISFSDLFGPHPKFDIEHIIPWHRCLLDSFANKTLCEVQENRSRKGNRTPYEAYSGDPDRYEEIKQRVREFTGPFGKAKLRRFRCEDIQKLPESLPLYGGEQLNATAYAARYAARHLALLYPQEERRKRVQVSAGRTTAYLRRAWNLNRLIGLADEKNRADYRHHAVDAVVIALTTPKLTGELSKAAARSVRPGTFQGLTPPPGLTRQLEEILDQMVVSHRVDRRVNGQLHEETFYGRIDNDSVTVVRKPLADLTDRDVAHIVDKKVQRLVREKLSGGAPPSKVFANPANLPAFVSPSGRTMRIRHVRVRVDASPVRIGSGAKTRLVLTGGNHHLEVFRVVEDGREKWRGRIVTRLEAMQRKKNGLPIVSRTDEDGHPLLFSLAIGDTVRLQWKGKDTIAVVQKLSANYYVFREHTDGRRAKDRPYAEQIVICADTTLQRSACRKLCVDPLGNCTVAHD

SEQ ID NO: 8792 - protein, 1335 aa, synthetic construct
  REGION 1..1335: note = Synthetic
MKVLGIDLGTDSLGWAIRNKDIETGNQIEDAGVIIFSKGVGEEKNNEFSLAAYRTDKRHSRRKYYRRKMRKGRLLRILIQQNMCPLSIEALDKWTKHVKGEAKIYLTEKAFIDWLKINPYEARREATKEKVDAFVAGRALYHIVQRRGFKSNRKDQSDEKELGIVKTAIAELEEYMHQDFLGTHFHKVLKKERKIDKDEQPIAPKVRGNYTARTMYLGEFEAIAQQQQFSVALTNTLHNEIFIHRPLKSQKHTVGKCTFEIKKHRAPISSLAFEEFRMLQFINNIKYKNLDNETPDWITLSDEQKAEIKPLFFRVSKASFNFAEIADKLTPKDKKGRWRFNYKLKQNVAGCICTARLKNFFDKHVSKDRWKALSNVESKDQISKHDVWHAIFSFNDSENLKQFGIKHLQLNEVDAEKFSKITFPQGYANLSEKAINKILPFLRAGFIYSHAVFLAKIPDIIGQKMWERKHETIIKTVRNLIDNEQKNNMINRIVNDSIHYFFESGFNAGDVYVLDEDDKHTILQKVKDYFGANAWIEKKENDKQAILQEIYDKLTKQLRLNVPKVSHRYLKIPRKDERIKDYLKQNYAASDEQLKLLYHPSDIDQFAKAKKNKNGDFQLGSPVTPSVKNPMAMRALHQLKKLINYLIREGKINERDKVILETSRHLSSANERAAIDTYQRNREKENQEYKKRIIEDCNKPDPKDEDILKYRLWKEQNEICIYTGESISVCDLFTDNPKYDIEHTLPRSKSYDDSQANKTLCEKTYNQQIKKQKLPVELDNYEDILQRVEPWKKKYEALDIQVKKLSKVGGSYEEPEQKKSRIQKKNRLIIERNYWRNKYQRFTLEEITNGFKNSQLVDIGIITKYSRAYLKSLFSRVYTVKGTTTADVRKMWGLQEGNDPKNRTKHIHHTEDACVITFLEPDLYQQLAEFYHQYEKFEDNEVKKPTFEKPKNWDSFVQDIKSLQNDVLVYHHKQNHLGKNTYKKWRVNGKIQKRFEWKKDENGKPYKRYLNLKDEKANTIYTKGDTARVPLHMESFYGNIMYNNEADTDKEKWQKLSQEGKGIYVKRKPLEFGDLGFKTEAQLQNIVDKVVREKVFNHINQYKNEKGKIDLKEALSKPIWMNEAKQIPIKKVRCFAGDVKNPIKVKKQRDQHSKIRKPYKEFFYAKNEGNVLIAIYKGLVKNKEKSGFELVNNFDASAYYKESNYAYRNQYPIVPESKDGLQLAQTLYKGNMVLLYESTPDEINWEDKKELSRRMYKVIGFATLRVQDKYDFGRIYLKHHMCAKKISDVKCEQGVFNLNDEIIKEHRMLLHTQINCLIANIDFYFDIDGSIERIR

SEQ ID NO: 8793 - protein, 1434 aa, synthetic construct
  REGION 1..1434: note = Synthetic
  REGION 1110..1111: note = misc_feature - Xaa can be any naturally occurring amino acid
LYIVTLYHTKIQKVTEIRDFSRKALSPRKFSTGISFWREEKAEGETGMSGEIKYEGGKRMKYRIGLDIGVASVGGCAMECDENGEPVRILDLCVRTFDAAEGEKGAPPAQPRREARGLRRRLRRRAHRLERVRALCAEAFGEDVLGRAEQNGEDLFRLRCAGLDEKLRDEELVRVLVHLAGHRGFRSNRKSESKDKETGELLKAIAENGEYMQAHGYRTVGEMFYRDPKYFEERAGRRVYTTRNRDGEYSRAFSRADIEKEARAILSRQEACGLVDGAFSEKYIEILLSQRSFDEGPAAPSPYRTEGYDVGDCPFEKGEKRASKAGFTAEYLAALQKINHLKIFLPSGEERFLSAAEREKLYAAAREKKEMNFAQVKKSLGLPEETSFNLVNYSARANVSPSDTEKKTKLFRMERSYELRAALDEKNRKNIPLLDEAANVLSLYKSDDRRMKAFSESGICAALSEEEKSRLLGLDFSGFVRLSYKAMNKLLPRLEEGLKYNEACEAAGYDFRAHDAPGDGKLSRLRGEEVRGYIEDIGVPVVRRALAQSVKVLNALLDKYGQPCGVNIELARELSKNSEERGRIARDNQKREEEFRAALEKLRTEFHLTAPKGTDVLKYRLYEEQGGKCAYSQKAIDSARLFESNYVQIDHVLPYSRSFDDGYNNKVLVLSAENQHKKDRTPFEYFGADEGRWGAFEAFVQTTYKNNRKKRENLLRRNFSEESAKDWKDRSLNDTRYICRAMYNLIADYLRMDPVAGKKKQVRAVNGRITAYLRNFWGLKKIRGAGDKHHAQDAAVIACVTDGTIARVTKYNKLKEKRAVWDQDAHKYLYADSDGVLLDADEYDSRSGLIKEPYRGFTDELRLRLSEAPKAYLPAKLLFLDGLGYTDQEIDGLSPVFVSRMPCRKAKGQIHEETIRSCRSKEEGVVSAKTPLVRLKLDKDGEIAGYNRRARQDDRLLYEALRARLQAFGGNGEKAFAEPFYKPTSDGKPGAVVKKVWTDTVFNTGVTLDRGAADNGGMVRIDVFEKEGKYYCVPVYIKDIYAKHLPDRAISAGKRFDDWVKIDDSFRFLFALFRNDLIYVKAKKPFNLSPNDKEEKQSVSVSEGFFYYRXXIVKNRKVCGGYFGEQISRKEGKEVEYGMGFINIFIGSEENVRVKEGKLVVREGREGFPVEDIGCVMVDNLRTNVSVYALNELAKAGAAVIFCDEKHTPYTCLLPHSGYYRRLAVLELQSALSKPRKKRLWQMIVRRKLEGQAACLRFYGKGEEAKKLEALSAQVNSNDPDNREAEGARLYFPALFGEGFTRGEDNGVNGMLNYGYAIVRSLIARHLCARGFECAYGIFHKNQLNAFNLADDMIEPFRPVVDCFAASLPPGETNPSRKRELFRVVNLSVDSGGQMHSLSNAVERMAESLLSYYKGERDDLVMPALAGLKEHLYE

SEQ ID NO: 8794 - protein, 1165 aa, synthetic construct
  REGION 1..1165: note = Synthetic
LYIVTLYHTKIQKVTEIRDFSRKALSPRKFSTGISFWREERTEGETGMSGEIKYEGGKRMKYRIGLDIGVASVGGCAMECDENGEPVRILDLCVRTFDAAEGEKGAPPAQPRREARGLRRRLRRRAHRLERVRALCAEAFGEDVLGRAEQNGEDLFRLRCAGLDEKLRDEELVRVLVHLAGHRGFRSNRKSESKDKETGELLKAIAENGEYMQAHGYRTVGEMFYRDPKYFEERAGRRVYTTRNRDGEYSRAFSRADIEKEARAILSRQEACGLVDGAFSEKYIEILLSQRSFDEGPAAPSPYRTEGYDVGDCPFEKGEKRASKAGFTAEYLAALQKINHLKIFLPSGEERFLSAAEREKLYAAAREKKEMNFAQVKKSLGLPEETSFNLVNYSARANVSPSDTEKKTKLFRMERSYELRAALDEKNRKNIPLLDEAANVLSLYKSDDRRMKAFSESGICAALSEEEKSRLLGLDFSGFVRLSYKAMNKLLPRLEEGLKYNEACEAAGYDFRAHDAPGDGKLSRLRGEEVRGYIEDIGVPVVRRALAQSVKVLNALLDKYGQPCGVNIELARELSKNSEERGRIARDNQKREEEFRAALEKLRTEFHLTAPKGTDVLKYRLYEEQGGKCAYSQKAIDSARLFESNYVQIDHVLPYSRSFDDGYNNKVLVLSAENQHKKDRTPFEYFGADEGRWGAFEAFVQTTYKNNRKKRENLLRRNFSEESAKDWKDRSLNDTRYICRAMYKLIADYLRMDPVAGKKKQVRAVNGRITAYLRNFWGLKKIRGAGDKHHAQDAAVIACVTDGTIARVTKYNKLKEKRAVWDQDAHKYLYADSDGVLLDADEYDSRSGLIKEPYRGFTDELRLRLSEAPKAYLPAKLLFLDGLGYTDQEIDGLSPVFVSRMPCRKAKGQIHEETIRSCRSKEEGVVSAKTPLVRLKLDKDGEIAGYNRRARQDDRLLYEALRARLQAFGGNGEKAFAEPFYKPTSDGKPGAVVKKVWTDTVFNTGVTLDRGAADNGGMVRIDVFEKEGKYYCVPVYIKDIYAKHLPDRAILAHKRYEDWTKIDDSFRFLFALFRNDLIYVKAKKPFNLSPNDKEEKQSVSVSEGFFYYRGINISTGAALIITHDNSYSTELGLKTLLKIEKYAVDILGNKYPVKREKRLNTEWDS

SEQ ID NO: 8795 - protein, 1203 aa, synthetic construct
  REGION 1..1203: note = Synthetic
MVISLMDIDKLTHQKPKLSFIIPRRPSPVNRKKKRSSAMKEPLQYVLGLDIGIESVGWAVIRCAPAYRMEDAGVRLFATAEQERGKSNTNQDRRTFRAARRLVRRRSHRKAMVKRHLERIGLLHPGELEAFFEDGSHDLLRLRVKGLDERLSPVELAACLINLCNHRGYREFYPLDEEEEKELTAAERQEREQESRGIERVKQIMAAGGYRTAAQMLLEDAAFAPADGGPMRVYRSHPHKADQYPLSRDMLRAEAEKILNCQSRFYPCLRQNYLTRYRKGGENRPLEMTNTEFLLQLVFEQRDFEDGPGDVNDNLRRYTGYLSALGKCQFYREENRGARMTALGDLYAAANALSQYRYLDTKTGELVLPPALARELLTAALLDAELPAKKINDIAKAHHVKANNKGLKKAELAPGCIKFLRAVRPVFEAQGIAWADVLGADPLQAQLQPDSLLNRIGHVLSCYQTPRRRQEELRRLPLSPDAAIQENLVKKLAQLHLSGTAKVCEKYMRDAVNAFLSGESYGNFQARLLAEQGRGPAARAAGTCVKLPPFPKDADFAKNPVVARSLNEARKVINAVVARYGSPWAVNLEVASELGRSYAERAEIESGIKKNEAAAEAERKKIAEIMGFTDLARVSSSMLERYRLAELQGWKSLYSGREFTDEQAVLDPRNALVEVDHIVPFSLILDNTLHNKALVFAEENRVKGQRVPLEYLTDPAGRKAFIKWVNKLAAEKKISRRKHQYLLLPDLHESGLLDEWKTRNINDTRYIAKYLRGYLERNLKPAAEHRSQFVFPVKGGLTSRFRRRWLNDKTWGRKDKDELRSLTTLHHAVDAVIIANLTPATAFIAEANFRLHRVYKMAGHRKNAEYWDLYNKDLDTLTTYFHYPRALAERSLDSERGGPDGLDITALIERLHEEVDVRFGEPGQDPDPAEYSRRVAAFYHDDPAFAATLRPILTSRKQERKWQGTLTGGNPQGAVEVDGVLLGRTRTNVLELTRKDLDRLYTNDGHLRDTLAAAFAAAQSDKTKLSELLAAQGKTEFRTNKGRLVHKVTLKGGALDNFYIKQIGAHNRSVLETSEYYCVEVYRDTKGQTKVRGIRRIDVTHKDKKLWLTCPYPAEYAEHVMYLFKNDYITVETKNGLMFEGYYQSSSGIKQNKFNGKKKNGVQTVQFRISGTAIVKKYDVDILGRKGGEIRCGAPLSLLPEKN

SEQ ID NO: 8796 - protein, 1190 aa, synthetic construct
  REGION 1..1190: note = Synthetic
VQLYYILPSAFCQPKRKGENTMKESLQYILGLDIGIESVGWAVIRCAPTYRIEDAGVRLFATTEQKQGKSNTNQDRRIFRAARRLVRRRSHRKAMVKRHLERIGLLRPGEVEAFFEEGGHDLLRLRVKGLDECLSPVELAACLINLCNHRGYREFYPLDEEEKKELTAAKRQEREQESRGIERVKQIMEQGQYRSAAQMLLQDKTFAPADGGPMRVYRSHPHKADQYPLSRDMLRTEAEKILNCQSQFYPCLRQNYQTLYRKGGADRRVEMSSTEFLLQLIFEQRDFEDGPGDVNDKMRRYTGYLSTLGKCQFYHGEDRGARMTALGDLYAAANALSQYRYLDTKTGELVLPPALARELMTAALLDAELPAKKINDIAKKYGVKANNKGIKKTELAPNCIKFLRAVRPVFESEGIAWADVLGADPLQAQMQPDSLLNRIGRVLSHYQTPRRRQEELRRLPLAPVAAVKETLVKKLARLHLSGTAKVCERYMREAVNAFLSGESYGNFQARLLAEQERGPAVRAAGNYVKLPPFPKDADFAKNSVVARSLNEARKVINVVVARYGSPWAVNLEVASELGRSYAERSEIESNNKKNHAATEAERKAIAEIMDIADPANVKGSMLERYRLAELQGWRSLYSGAEFTDKRAVLDPRSTLVEVDHIVPFSLILDNTLHNKALVFAEENRVKGQRVPLEYLTDPARRKAFVKWVNKLAADKKISKRKHEYLLLQDLHDSGLLDEWKTRNINDTRYIAKYLRGYLERNLKPAAEHRSQFVFPVKGGLTSRFRCKWLNENTWGRKDKDELRKLTTLHHAVDAVIIANLTPATAFIAEADFRLRRVYKMAGKRKTREYWDLYNKDLDTLVTYFHYPHALAERSLNIERGGKNGLNITALIERINEEVDVRFGEPGQESDPAEYSRRVVAFYQDDQAFAAALCPILTSRKQERKWQGTLTGGNPLGSMEVDGELLGRTRTDVLLLTRKDLERLYTNDGDLRDSLAAAFAGAQGEKTKLGDLLAAQGKTEFRTQKGRLVHKVTLIGKPLNSYYIKQIDAHNRSVLETSKYYCTEIYRTKKGEITMRAIRRIDIVCKNKKLWLACPYPEDYVEHMMYLFKNDYIRIIEVDGTEHEGYYQSVADTASCRINVLHANEIEARAPRVTISKRRTKVICKYDIDILGRKGGEIRCGAPLSLLPEKN

SEQ ID NO: 8797 - protein, 1180 aa, synthetic construct
  REGION 1..1180: note = Synthetic
MMFTLMDIDKLTHQKSKFKIIIAAQKMIVNGKGVQIMRYVLGLDVGIQSVGWAVVRCDEPARIEDFGVRVFDTTENPKSKDNANQNRRAFRSARRVLRRRSHRKEMLKKHLEKIGLLHEGEVEALFESGRADPLRLRVKGLTEQLAPAELAACLIHISNHRGYQAFYNLTEEELTDLPASEKKEYQQELSGIEQVTSIMEQGGYRSVAEMILNDEAFAPEDAGPMRSYRSHPYKEIRYPISREMLKKEADEILRVQAEFYPCLNEPYQVTWRKERRTPSNREFLEWLIFRQRDFEDGPGDCDDAMRKYTGFLQALGKCPFYRSENRGPRMTVLGDLYTLVNSLSQYRYLNTKTSELGLPKALAQELLENALKDAALSADKIKELAKKYNIKIDNKSVKTADRAPNCIKFMCRVRPVLEKYNIDWVSALGGTSLEEVLDESTMLNQIGRVLSLYQTPHRRKEELMKISGVSQDLAERLTAIRLSGTAKVSAHYMQDAVKAFQLGERYGEFQWKKMNELEQALTGQARGVHVKLPPFSADAEFAKNSVVMRSLNETRKVINAIIGQYGSPWAINVEVASELGRSWAERAEWDKKNKQNWDQSEKEKERICEIMGYDSPDQVKGSMLERFRLAEQQNWQCLYTGKPITDKRAALDPKNYNFEVDHIIPFSLILDNTLQNKALVCADANQTKGQRTPLMYLHDAAQREQFIGRVNQMAKDHIISDRKRQYLLLDQLENSQLLDEWKSRNLNDTRYIAKYLRGYLERELAPAAEHRTPFVFPVKGGLTSRFRRVWLDKETWGGENKENLRDITTLHHAADAVVIANISPATALIAEDNMRLNRILKNDRGRQTPEYCAQLERSLQTLEQYYHIPRAKAEAYLKRQNRISARIANLNIEVNIRFGKPGEEMDLDTYRSNVLHYYHDDASFASNLIPPLTSRKQERKIQGCLTTGNALGTMTVDGELYEAERIDVMKLTQKDLPRLCTNDGDLRDSLTELLATAGDKPLKDVLPKQSENEFRTQKGRLIRKVTLKGKQLSQYKIKQIAENNYSVLDTTKYYCTEVYRDTVGKTKVRAIARADLVRRDKKLWLTCPYPADYAEHIMYLFKNDYIRVETPNGLQFEGFYQSLAGIKQAKFRGIEKNASALRRFSISGIATVTKYDISILGKKGGEIPCGEPLSLLPEKK

SEQ ID NO: 8798 - protein, 1154 aa, synthetic construct
  REGION 1..1154: note = Synthetic
MVVNMEGVSIMHYVLGLDIGIQSVGWAVIRYDEPARIEDFGVRIFDTTENRKSKDNANQERRAFRAARRVVRRRSHRREMLKKHLQRIGLLREGEVEAFFESGKSDPLRLRVKGLTEQLTPVELAACLIHISNHRGYQAFYNLTEEELNELPASEKKEYQQERSGIEQVTGLMEQGNYRSVAEMLLTDAAFASEDGGPMRTYRSHPYKDTRYPISRDLLRKEADAILMNQAQFYPCLNEAYQVTWRKESRTPSNREFLEWLMFEQRDFEDGPGDRDDAMRKYTGFLQALGKCSFYRQEDRGPRMSVLGDLYALTNSLSQYQYIDEKTSAFGMPKTLANDLLEAALHDAELPAKRIQELARKHSVKIDNKAVKTADRAPNCIKFMRRIRPILEKYGIDWEQALGGATLEEALDDNTMLNRIGRVLSLYQTLHRRKEELVKIPGISPELASRLTAERISGTAKVSAHYMRDAVEAFQLGERYGEFQWRRMNEQEQPLPGQASGANFKLPAFPASAEFAKNSVVMRSLNETRKVINAVIERYGSPWAVNVEVASELGRSWAERDELDRRNKQNLAQTEKDKKQICEIMGYHSPDQVNGSMLERFRLAQQQNWQCLYTGKPITDKQAALDSKNRSYEVDHIVPFSLILDNTLQNKALVCADANQTKGQRTPLMYLRDPQQRELFIGRVNQMAKNHVISDRKRQYLLLEHLGNSELLDEWKTRNLNDTRYIAKYLRGYLERELAPAAEHRTPFVFPVKGGLTSRFRRVWLDRETWGGDEKGQLRETTTLHHAVDAVVIANITPATALIAEDNLRLNRILKSSHGVETAEYCAQLERSLQTLEQYYHIPRAKAQAYLKRKNRITALIPTLNIEVNIRFGSPGEEIDPDTYRACVLYHYHDDPAFAAGLTPPCTSRKPERKVQGGLTTANALGTMEIDGVLYEAKRVDVMKLSWKNLSQLCTNDGDLRDSLIELLAETGDKKLEDILSAQNKTEFRTRKGRLIRKVTLKGNVVDQYRVKQIAPNNYSVLNTTSYYCTEVYRDTAGKTKVRAIARADLVRRDKKLWLTCPAPADYAEHIMYLFKNDYIQVQTHNGVLFEGFYQSPAGIKQAKFNGIEKNASGSRPFRISGTATVTKYDISILGKKGGEIPCGAPLSLLPERK

SEQ ID NO: 8799 - protein, 1144 aa, synthetic construct
  REGION 1..1144: note = Synthetic
MHYILGLDVGIQSVGWAVIRYDEPARIEDFGVRIFDTTENQKSKDNTNQERRAFRAARRVLRRRSHRRAMVKRHLQRIGLLREGEVEAFFESGQSDPLRLRVKGLTEQLTPAELAACLIHISNHRGYQAFYNLTEEELKELPAAERKEYQQERSGIELVEGIMEQGHYRSVAEMLLTDDTFAPDHAGPMRVYRSHPYLDTRYPISRDLLRKEADAILTNQARFYPCLNAPYQTTWRKESKTTTNRAFLEWLIFTQRDFEDGPGDRDDAMRKYTGFLQALGKCPFYREEDRGPRMTVLGDLYALTNSLSQYQYMNTETGVFELPKELAEAMLAAALRDAELPAKKIQELAKRYHIKVDNKAVKTADRAPNCIKFLRRVRPILEKYGINWETALGGTTLEDVLADDTMLNQIGRVLSLYQTPHRRQEELVKIPGISPELAKRLTAERISGTAKVSAHYMRDAVEAFQKGERYGEFQWRRMNELEQPLPGQASGAHVKLPPFPVDAEFAKNSVVMRSLNETRKIINAIVGQYGSPWAVNVEVASDLGRSWAERAELDRRNKQNEAQTEKDKQQICQIMGYDSPDQVKGSMVERFQLAQQQNWQCLYTGRPITDKRAALDPKNKGFEVDHIVPFSMILDNTLQNKALVYADANQTKGQRTPLMYLRDPAQREQFIGRVNQMAKNHIISDRKRQYLLLADLYHTDLLDEWKSRNLNDTRYIAKYLRGYLERELAPAPEHRTPFVFPVKGGLTSRFRRTWLNRSTWGGDEKSELRESTTLHHAVDAVVIANISPATAQIAEDNLRLNRILKNSRGIERPEYRAQLERSLQTLEQFYHVPRTRGEACLKRQNRITALIANLNIEVDIRFGVPGQTTDPDSYRSLVTNFYADDPDFAARLTQPLTSRKPERKLQGTLTTANALGTKEIDGVLYEAKRTDVMKLTQKNLSQLCTNDGDLRDSLAELLADAGTRTLADVLSEQGKTEFRTQKGQLIRKVTLKGSVVDQYKIKQIAPNNYSVLDTTSYYCTEVYRDPAGKTRVRAIARASLVCKGKKLWLTCPNPADYAEHIMYLFKNDYIRVETPNGLQFEGFYQSPAGIKQAKFNGIKNNDAKSCPFHISGGAVVKKYDISILGRKGGEIPCGEPLSLLLEKK

SEQ ID NO: 8800 - protein, 1070 aa, synthetic construct
  REGION 1..1070: note = Synthetic
MVTKILGIDIGITSIGWGLIEVDNDNKENSRIIDCGVRLFSKAENPKDGKSLALPRRLARSTRRNFKRKRVRVKQIKILLSKYLDIKLEDFISEDEHLPEFFITNKNFISPWQLRSDGLDRKLNNKEFARVLLHIAKRRGYNDKTNISEETIENKESKIILEAINTNKEQMQKAGYRTIGEMMFKKYYNKEISKGKYENVRNHKSKDSKEISYRRSIGREELKKEIEILFCAQRKFGNQKATQDMQKSYMDIAFYQRDLKSFESMVGDCEFFKDQKRACKCCFSAEKFINLGKIINTLIFVQKYAGEVYSKEKIQEKIQEILSEAEKTKLGITYKKLRKILNLEGVEKFEFSALDYTKISKIKTGEEEIIKQKDPESQIFIKFEKYHKLKDYLSEFSEEFEKLSQETLDNIANIIAFNKSPKILEEKLSFLSISEAMRQKLIQNQLNFNQTINLSLKALYKILPIMEQGSNYREALEEAKLLKQDSNNKKDFLPPLSETEEFSNVLNPVVNRAISQYRKVVNSVLRKYGEVHKIHIELAREVGKSFADRKKIEKEQKELYERNQEALKICKTIGLEPNGQNILKVKLWIRQNEICVYSGKKISSNDLKNDKKDNSKNNKEDDKKLEIDHIYPLSRSLDDSQNNKVLVFAKVNDEKNDRTPYEWLKGNEQKWNTLIIRLRTMCNLPENVKRKIVDKNFMDKKLGTRGEYLTRNLNDTGYISRLVSQYTNEYLKFLPLEENENIYLKSGVKSSKKHIVVISGSLTAMLRHYWGLDSKNRDTHLHHAQDALILAFTTDSNIKAFTDYLKSKEEGYYKKIKADRKALELRKSDNKAKYLLRDPIKNFRSKTKEAVEKIFISRASQRKVTGTLHEETIRSKKDYFKSYGGEKGVQKALELGKIRQINGGIFDNGDMVRVDIFKSKDKGKYYVVPVYSYDIAIGKLPNKAIVYGKDKEGVIKDWLEMDSNYEFCFSLFRNDLVQIQTKKMQNFEYAYYVSTDSGTGSLTFRHHSNYLSSESEKVFFKIKKSSGFLAQNCGIQDLKIFKKCIVSVLGEINEAKFEPRKDIKLKTTKK

SEQ ID NO: 8801 - protein, 1048 aa, synthetic construct
  REGION 1..1048: note = Synthetic
IKILGIDIGITSIGWALVEADRDLRENNKIIDCGVRLFTQAENPKNGESLALPRREARSMRRIIKRRKARMSQIKKLLCKHFGFAFEVFVSDIPSLPKLFATHKAFLSPWELRALGLERKLSDTEFARVLLHIAKRRGYNDLSTIVDDNHASDKAKKEKVILNSIKENKKQMETKGYKTIGEMMFKEYYGKEISQGCYENVRNKGKQEESHQQGAKENYKRSIGRRELQNEIEEIFKSQREFGNQKAHKGFEDDFKKIAFSQRELKSFESKVGNCEFFPEEKRASKCCYSAEEFINLTKIINTLKNIEHISGEIYPKEIIKEILDRSKRLKGGLSYQKLREILKLDEKIEFKDVKLDYINDKKPEDKIFIKFQKYHELKDYLRDFEAEFTSWGADILDNIAQIITFNKSSKILSEKISKLPISKPLQEKLINNSLGFSTTIRLSLKALDRILPYMREGKRYDEAILLAGLKKDSPTNNKCSLLPPLSETGFADTLNPVVNRAMAQYRKVINAIIKKYGKVHKIHLEFTRDIGRNFKERSRIFKEQQENYRRNQDALEICKTYGLDETQKNILKVKLWICQDEFCVYSGKKITKECLRDANMLEIDHIYPLSRSLDDSQGNKVLVFATQNQAKGDRTPYEWLGNDTEKWDEFEKRIRTMKKLPRNVKKKLFNKNFAGKHIGDRASFLARNLNDTGYINRLISQYTASYLEFLPLSDIEDMSKKAGAKGSKKHILTLNGGLTSLLRHYWGLEAKNRDTHLHHAQDAIIIAFATDGNIQAFSTYLQTREQAYLEMSKKAKNIQERGDNKTKKSLQKPLENFATQVGEKINNIFVSKAPRRNVTGALHEQTIYPKEKYLDVYGGAEGVEKALKLGKIRQIHQGIVANGEMVRADIFKSKDKGKFYVVPIYTYDVAIGRLPNKAIVQGKDKKTGVIKDWIEMDTNYTFCFSLFKDDLVQIQTNKMSKSLYAYYAATNASTSGMTFRHHSNKILEENEKEFFKEKPNSGFLADGCGIQNFKIFKKCIISPLGEICEARWEPRKDVRLKTTKKKP

SEQ ID NO: 8802 - protein, 1036 aa, synthetic construct
  REGION 1..1036: note = Synthetic
IRVLGLDIGISSIGWSLVEVDPKVQGVGEIIACGVRLFAQAENPKDGKSLALPRREARGARRANKRKRARIKQIKILLSKHFNVDLKDIVSEGEFLPNIFTTSKEFISPWELRSQGLDRKLNDEEFIRVLLHIAKRRGYNNSNQNQKNEKDGKVILESIKSNTEEMHRLGYRTIGEMMCKEHFSKEISRGIFENVRNKAKKESKDSEGSKPSYVRCVGRKDLQEEIKILFDSQRKFGNKGATDELEESYNKIAFYQRDLKSFESMVGKCEFYPEEKRASKCCYSAEEFINLTKIINTLAHITEKTKEVFSKEIIELILARAKSVKKGLSYKELRKILKLEDHPSIIFRGIDYTKKDIEKNTFIEFPKFHELRGYLSDFEEEFDSLDIKTLDEIANIIAFNKSQKILKEKFSKLPISKSMQERLILNQLGFDKTISLSLKVLYKLIPLMKEGKRYYEATKEAGLLEFSSKDVKKGFLPPLIDTDFKDTLNPVVNRAVSQYRKVVNAVIKKYGRLHKIHIEFARDISKNFNERKKIEIEQNKNRDLNNEAKRLCESIGLDPNGRNILKLKLWKQQDEFCIYSGDKITIQDLKEENKLQIDHIYPLSRSLDDSQNNKVLVFTTQNQLKGNKTPYEWIGSNKEKWEDLRNRINAMKRLPRNVGKKIMNTAFVDKSIGSRSEFLSRNLVDTGYINRLIGQYTSKYLEFLPLGKSEDTSAKSGSKGSKKHILTVSGELTSILRHYWGIDSKNRETHLHHFQDSLIIALATDANIQSLSNYLKSKEERYKDSKEKAKDIQENLQKYKKPVVEPLIDFRLKLEEAIKAIFVSRAPRRSVTGALHAQTIFKREEKWKEYGGGEGVNRALELGKIREINGGIVTNGDMVRVDIFKSKNKGKYHVVPIYTYDFAIGRLPNKAIVSGKNKLGVIKDWLEMDENFEFCFSLFKDDLVCIQTKKMHESVFAYYVGTTSSTGTLTFRHHSNCISDDEKEFFRTSSSSGFLAQNYGIQDLKVFKKCSVSVLGEISEVPFEARKDIRFKTTKK

SEQ ID NO: 8803 - protein, 1065 aa, synthetic construct
  REGION 1..1065: note = Synthetic
IKILGFDIGITSIGWGLIEVEDGVRKDGQNRDSGKIIDCGVRLFKKAEGDKGASLALPRRNARNVRKIFKRKRARIAQLKNLLAKSLGINAQDFLPQGNHLPKLFTTNKNFLSPWELRALGLERVLGDVEFARVLIHIAKRRGYNDLQMIEPEESEDSQDKEKNEEEKKKKQEEQAMLASIRKNQEYMQNSGYRTIGEMMCKEFYGKEISKGHYQNVRNKGGSEEQEGKKKDKKKNQDKFMCSIGRRELQDEVRILFATQRELGNQKATQALQDEFEKIAFFVREPKGFVVGKCTFFKEENRASKCCYSAEEFINTTSIINLLKKLKNTTGECRFDVSPELIGQILQEAKATKTGLSYKKLRKILELDERVKFQARGLDYTKKDPENKIFIKFEKYHKLKDYLSDFAEEFESLQRDVVDRIANIIASNRSQNILKQELQDLPISEGMREKLVFNPLNFKETINLSLKALGEILPLMLEGKRYDEAIKEAPLDHHSTQDLEKDQEELPALEHTEFANSLNPVVNRAIAQYRKVLKAIIKKHGYIHKIHIEFTREVGKSFEERDKINKQQEQNDKRNQEAQKRCQEMGLEPNKSNLLKVKLWLLQGEFCLYSGEKIKIEHFKDPKLLQIDHIYPLSRSFDDSLGNKVLVFAKQNQDKKNRTVYEWIGDDKDKWDTLYKRICAIKTLPEAVKKKILNTNFKDRNIGDRMGFLERNLNDTAHINRLVVGYTSKYLKFLPLSEDEDMTLKAGSKGSKRHIIVLSGSLTSMLRHYWGLGSKDRDTHLHHAEDALIIAFATPRNIKAFADYMSLREKGYQKAKEEAETLRQSSDYKTKKQLAIPMDKFRDQVNQAVEKIFVSWASRRKVSGALHEATIRKPEAYFKAYGGQEGVNRALKLGKIRSVNGGIVDNGEMVRADIFKSKDEGKYYVVPIYTYDVAVGKLPNKAVVSGKNKENVIKDWLEMDGNYEFCFSLFKDDLIEIQKKEMPHSVYAYYAGIDSSTASLTAKHHSNHLKEEEKGFFKSDKSGAIIGSGIQNLKVFKRYIVFALGEITQAEFEPRKGICLKTTKR

SEQ ID NO: 8804 - protein, 1527 aa, synthetic construct
  REGION 1..1527: note = Synthetic
MVRILGLDLGTNSIGWAVVDKSSDTYQLIEKGVHIFSEGVKLEKGNEKSKAAERTSFRSARRLKFRRKMRKYETLKVLIESKMCPLGIEELELWRNSVDPNTGKKQSFKRYPKNKEFLNWLNTDEDTNKNPYFFRDKFSRTKYNWQDNQNAAYELGRAFYHMAQRRGFASNRKDQDGEDQIEILRSDLFEALEGWEELATSKELHDNFEVILSNYADSTDPKVKRIIREVRRQFKEKNLLIHEIVKNLKSTLKDRRNLGPVKQNIHELTDKIKAAGCETLGQYFYLLYKKDRHNIENKIRTRYTDREEHYKTEFDTICKKQNIPKTTVSKLRKAIFFQRPLKSQKGLVGKCSFEVNKPRCPVSHPSFEEYRMWSFINNIKIKTPEDEELRVLTESEKQAILPKFYRISKPNFQFQDIADELLPKGHYAYFRSREAREANCLINYRPDTTVSGCPTTAALMSIFGRKWEDKAAWRKKLTQSWRVKTKKNGERKTQSEIINDFWHALFNADLVGDKKDLIGKSRQEKLEEFAKKNTTLTDDQVRSFSKIRSLKSEYARLSLNAIHKILPWLRQGLIYSHAVFMANMPKVVDKDIWKDEENRIEIKNGINNILESHAIENKLALITNGELKSARDAHETYSKENEPVYRHLIENRLKEAFGTSSWKDLDNKGTILEKTFHEFISQFQKNMGKGSFLKVKRIDEKVIAFLKGDNENGVVYCNNDDRLKDLYHPSDIERYQPVPLKEKGRILMQNGEPLMGLGSPVIAAIKNPMAMRTLHQLRKLVNALIKEGIIDERTKIRIELARELNDANKRAAIKKYQVEREKQREYYRQMIRELYKKETKRDINPTDDDILKFQFWIEQDPDHQPPITEQEVLKYQLWSEQQHRCIYTGNTIGIADFIGPDPKYDIEHTIPRSASFDNSQMNKTLCERKFNREIKGDKIPFQLSNYNEILTRIEPWKNKFEELDKQIQILRRRSRAATTKEQKDKIIQERHYLTLHRDYWKGKYERFTLEEIKAGFKNSQKIDTGIITKYAREFLGSLFKNRSGNPNVYSVNGEMVAAFRKAWGLQESYKDEFGQTHYKEKDRSNHVHHCIDAITIACMAKEKYDEMAHAWKLEEKEKFNAVRELLEESKPWQTFAQDLKRIEEEVLVVHQSKDNVPKQTKKKLRKRGRIQYRDKAKNQPIYQQGDTVRGSLHKETFYGAVKQPEKVNGKILFNESNKMVLQKDKKTGEDAIYYVVRKKLSDLSDADLKKIVDDRVREIAIEARKEEKKLKKEIDAIKKKIRKADEEQESELKAQIKNIEYKIANDLYVIPPKEGKSQYTPIKKVRINAKLAEPLKDFKKHRDTSRHTHKQWYYVQNDTNYCLVLYESDDRKKRAAEIIKLMDAAHYFKSSNGEREYPLIEPERKGMKIRGFLKPDTLVLFYERNPEEIWELDESEIRNRLYYVRKTAKNGQTTFQFHQEARNDESLKEDYRKEHGKEPPKSLTNGESGVDFDRLPIPKLLLSPINMRLLIEGVDFKISHLGKVERI

SEQ ID NO: 8805 - protein, 1140 aa, synthetic construct
  REGION 1..1140: note = Synthetic
MKNYTLGLDMGVASLGWACLSIEEKTIDSGVRIFPAGMEKERDAYTSKNLKRRSKRTARRRGSRKAKRKQLIRQILIELQWIPSEECALQDWENLDPYELRHRAINEKITLPEFARVILHLNQRRGFLSLRKAELDAAEGDDKKELEGLLGNISRLQTQIDEAKHETLGNHLYQLRKKEGGEHGNTIRLRARHIHRHMLHHEFSLIWREQAKHHPELTDTLRYGSHGPQDDPTAVTKPIPRNKTESLLQQFGLENLTFFQRRVYWPLSSIGHCELEPDELRAPVADRRFQEFRMLQELNNLRYLDQSSPGKPQERKLNDGERQVAITYLSTTQKPTLKALKKKITKLPDSPEEAHITFNLEANNRENISGLPTENKLANTLKSTWPKLDEAGKNRIVEILTLPDDSNSGKVIQRTDDETRELLEQVPTLSHDDIDKLLKTSLPTGYGHLSVVALEKMLPHMREGKLYQGKKDEDHLSARHLAGYPRRDETSSKSFDILPHLTQLTNPSDTSHYEPHFPHLNNPLVLRALHELRKVVNAIIRKHGKPTAIHLEMARDLKMSAKKREEHAKKTKQHEKERTRAKNELAKYNVAPTRDAILLFRLWEEQNKTCIYSGEPISVQDLLGGNVDIDHIYPRRANDDSYLNKVVCFTEQNRLKGDRLPSEWLGEGSTEFEALAQRAQDLPYPKRKRLLADKLPDGFAERDAVDTAYMTRVARHYLSTLFPKKEEHRIFCTKGRHTALLCRHWQLNDLLRHDLLDLKNRDDHRHHALDAIVIAACDRSLLQKVTKELKYENHWKDKQDEESKEKIRIYRLKPQLENLVSPWPEFRVAAAASLDAIWVSHRPNRKVSGPLHEETNYGSTSEPGILVRRKRLATLSDGEIAKIRDVSVAHVVQQYLEQEKILYPEDFGKKMDDDVRAHFEKHQTLTESDIHALETDNRRLKGDLLNKLKKKNPLQDAELGKITLPNNKGGEAIPIKKVRLLIPNKAAVPLRPDGNAKELIIPGNTHHVAIFSLGDGKSHFEPVTLLEASRRKRNGEDIVQKHYPNMPPEAEFRFHLTYNDSITSETNNETRLFIFKGIHSIQLTVKFVHHCDARQNNQKDPITGRAVSIQKTSSPNRFEDNFPNARKVIVLPSGEIRDVN

SEQ ID NO: 8806 - protein, 1121 aa, synthetic construct
  REGION 1..1121: note = Synthetic
MSKKKAGCSVEQRPLNLIIATKRTTNSDQLPNAEYAWTAAGSTYKCSNMNPSKYTLGLDMGVASIGWAVVSQEDKFIDCGVRVFPAGLDNFNSAKEKHPNMDRRSARGMRRRIRRKAERKKLIKGILQQLGWMPKDPVALDQWMAMDVYELRSRAIHEQISLDELGRIILHLNQRRGFLSLRKAEEDSSDKETQGMLGEIKEFQKEIDSSGAQTVGNYLYQIYQKEGIHTSLRNRNNNRRLNRSMLYHEFDLIWNTQQAYYPDTLTEQLRYGSLGKKEKPTKVVKPVPLEDGRNLLDQFGIENLTFFQRKVYWPAGSIGQCELEPEEKRAPVADRRFQEFRMLQEVNNLRVLDDSNPRHPEERKLTPEERNATIAYLTGKKEVTFDALKKHLCKHRALQASLPDSPAQLKFNLEAGGRTKISATPTDHTLSARKTLAKDWNALPEDTKNRIVEILTAPAATDDDIAENLSTLSELTDDQRDKLLRTVLPSGYCNLSVVALEKLLPHMRQGKVYMAKDQSDSALHAAGYKRRDEEQTSTFDLLPNFAQLTDPKSSFYDPHQVIINNPVVLRSLTELRKIVNGLIRKYGKPHKIHLEMARSLKMSPKQRSEHQKRNRQHEKERDAARKDIEKLGIIPNNDAIILYRLWKEQDKLCVYSGKPISISQLFNGEVDIDHIYPFSQSADNSLSNKVVCLSQENRDKGQRLPYTWLAHSDPEKYEAALQRAKKLPGGKYKRFIAQQIPEGFVNRDLNDTAWMAKAARQYLSHLFERPHHILCTKGNHTSTLRNQWELHSLLRHDELDLKNRDDHRHHALDAIVIALCTQDRIQEITRKLKHELKVKEAREEGKRVFHFRAEGERLEIPWHNFRLDVAERLNSIWVSHRPSRKVSGALHKETNYGKTAEGKLVLRKPVQSLSKKEVEGICDDTIRDIVRSYIHEAGGDLAALKAISADAPLTMPSGIPIRKVRTAIPYAHITIRPGSPHETHVQSASTHHLAIFSLGEGKFHFEPVTLYEATRRQRHREPLVQKSYADMPPEAEFLFHLCSGDSILAEIDGTDQLFVFNTMATSTGQVWFAHHTDAAQGHKDPDTGQSLLRSCMPGSFAKKFPNARKVTVLPTGEIRDA

SEQ ID NO: 8807 - protein, 1091 aa, synthetic construct
  REGION 1..1091: note = Synthetic
MIPSKYTLGVDMGVASIGWAVVSTEDSFIDSGVRIFPAGLDNFNSSKEKHPNLDRRGARGMRRRIRRKADRKALIKEILKDLGWLPSNDKELDQWHKLDVYELRSRAISEKISLRELARIILHLNQRRGFLSLRKTEESDADKDTQGMLGEITELQKSIDESGAKTLGNYLYQIYQKDDISIRLRNRHTRRSMLHYEFSLIWETQSKFNPELTDKLRYGSTGRLEKPIKVVTPIPRVKEASLLEQFGIENLSFFQRRVYWPENSIGQCELEGPILAEELLKKSCDKKVAKELQSKIRRAPIADRRFQEFRLLQEVNNLRILDNSVARRPEERPLTSQEREIVIDYLTGKKEVKFEALKKYLCKHKELKATLPSSPSQLTFNLESGGRTKISTTPTDAHLVSTKGLGKEWNDLTNDTKNLVIEALTRPAAIDEDIRADLEKIHDISSDHIERLLKVSLPAGYGHISIKALEKLLPHLRKGMLYMAKDTNDSALHAAGYKRRDEQHSDALDLLPTFQALVDPNSKFYDPHQVIINNPVVLRALTELRKVVNGLIRKYGKPAQIHVEMARELKMSPKARSEHQKKTRQFEKERDSARKAIEELNVIPNRDAINLYRLWKEQGELCIYSGKTISLFQLFNSEVDVDHIYPFSNSADDSFTNKVVCFAQENRDKGNRIPYTWLSHSDPEKYEAMLQRAKKLMGGKYKRFIATEIPDGFVNRDLNDTAWMAKAANHYLARLFDKPHHVLGIKGAHTAKLRDQWELHSLLRSDGLDLKNRDDHRHHALDAIVIALCDRERIAELTKKLLFETRIKEAKQEGKRIYHLRTSGDKLVIPWQNFRLDTAESLNSIWVSHRPKRKISGALHKETNYGKDYKGDLVVRKRVQDLTAKELAGICDPTLQSIIQTHIREMGGNIKALKEISDDSPLTMPSGIAIRKVRTARPYAHITIRKGTPHETHVQSAATHHLAIFTLGDGKFHFEPVTLYEASRRLRAKEEVIQKVYPNMPAEAEFLFHLCSRDSMMATIDGTDQLFVFNTMATSTGQVKFAYHTDAAQAHKHPETGVSLLRTCTPGSFEKNFPNARKVNILPTGEPRNVS

SEQ ID NO: 8808 - protein, 1077 aa, synthetic construct
  REGION 1..1077: note = Synthetic
MADPGLLKYVLGLDIGANSIGWALLTARGDERLTPTGIVQTGVRIFEAGVEGDLERGREESRGIQRRLARQARRRLDRTARRLAKVFGLLQDAGLLPRADTPASLPGVGVPREHMTARERRDERLRASAERDALLAQLDRELVAQCQDGLRAAGASQGEIWLVPHRLPYLLRARALDNKLPAHQLGRALYHLAQRRGFLSNRKAAPKKDEDQGVVDQGIQKIVAGMRETGARTLGEYFSRLDPTGERIRGRWTSRAMYQDEFDAIWAAQAPHHPEILTADLRKRLKRAIFYQRPLKVQKELIGECEFEKGRKRAPMALLVAQRFRLLQQVNNTRILTPDAVERGLTAEEAGKLIDALDTLGDITFKKAKRLLGLSQQHVFKFESGGEDKFIGNRTATKLIRVFGLDRWKTLKPSDRDRIVDDLLTIQKPETLARRAQRVWGLSPEAARELARTSLEDTHCRLSRLAIKNLLPLMETGMPYMTAARQVYGEKPAEPPRDSLPAVSEALPALRNPAVHRALTELRKVVNAIVRTYGKPAAIRIELARDLRKSPKQREQTWKKNRDNEALRKDAAEKLFREMGIQNPKRSDIEKMLLLQECGCMCPYTGKHISMRDLFGDAPQFDVEHIVPFSRSLDDSFLNKTLCEVAENRNVKGNRTPWEAYGHDLVRWNQILQRVSHFQGSAQREKLRRFQLQTIESPEQFASSQLNDTRYAAVEAMDFLKLLYGEEAQRKVIVQAARGGTTRFLREEFGLNQILGDGGEKSRDDHRHHAVDAICVALTDPATVKMLSDAAARALSEGRRRFASVPFPWGRFLDDVRASIQGINVSFRVSRKVGGALHEATFYSPPKKDPKTGQEHVHVRKPVTALSEQRVGNIVDPVVRAAVQAKLKEVGGDVRKLADNPPTLRAKDGREIPIRKVRLRESITPFGIGQGGARQVVTDTNHHVEIVQVPGKAGQPKWEGCVVSQYEALRRLRAKEPVVRRDHGNGRTFVFSLALGETVQMKGDDGQLALFKVAGVSQTGRGQIMLEFRRNADARPATVLRKIKGGRVFRTPDSLRSAMGTKVLLTPLGELRRVGRD

SEQ ID NO: 8809 - protein, 1085 aa, synthetic construct
  REGION 1..1085: note = Synthetic
MSTGELLNYVLGLDLGANSIGWALLAAAQEGDRLRPTGLVATGVRIFEAGVEGDLERGREESRAQKRRLARQSRRRLERTARRLEKVFRLLQSAGLLPQSQPPAALPGIEVPKEKMTARERREERLRHAAEREAILARLDAACLVRWSDKLTAEKASEADIALLAHRLPYVLRARALDEELPLDELGRALYHLAQRRGFLSNRKAAPKKEEDKGVVDRDIAKIAAAMQETEARTLGEYFSRLDPQQERIRGRWTSRRMYEDEFERLWAAQTPHHPDVLTSDLKKKVKRAIFYQRPLKVQKDLVGECEFESGRKRAPMAVLCAQRFRVLQQVNNTRVLAPDGVERGLTPEQAGTLLDALETQGDVKFAKAKKLLKLSPQHVFKFESGGEDKFIGNRTAAKLIGVFGLDRWKGFTLAQRERVVDDLLTIQKPETLGRRGQSFWGLDAEAADNFARVRLEDTHCRLSRLAIENLLPLMERGMSYMTAAREIYGERPAPPPVDLLPAVGEAMPALRNPAVQRALTELRKVVNAVVRKYGKPAAIRVELARDLRKNRKQREQTWKQNRENEGLRLDAARRLLEEMHMQGPKRSDIEKMLLYQECACQCPYTGRHISMRDLFGDAPQFDVEHIIPFSRSLDDSFLNKTLCEVAENRNVKGNKTPWEAYGHNPQRWSEIIQRVSRFQGNAAREKLRRFQLQSVQELEDFTSSQLNDTRYASVEAVKFLKLLYGEEAQRRTIVQAARGGTTRFLREEFGLNQILGDGGEKSRDDHRHHAVDAVCIALTDPATVKMLSDAAARARSERRRRFAPVPFPWGGFVDHVRAAIAGINVSFRVSRKVGGALHEETFYSPPKKDPATGRECVHVRKPVSALSEQRIENIVDPAVRAAVQAKLKQVGGDPRKLADNPPKLKAKDGREIPIRKVRVREYITTFGIGQGGNRQVVTDTNHHVEIVETRVKAGQAKWEGHVVSQYEALRRLRAKEPVIRREHGEGRMFMFSLALGETVQMRGDDGQVGLFKVTGVSVTSGAHVDLEFRAIADARPASRLRKEQKENPKLKGWRVRRTPDSVRQSSAQKVLVTPLGELRRVGRD

SEQ ID NO: 8810 - protein, 1082 aa, synthetic construct
  REGION 1..1082: note = Synthetic
MTSQTEGEYALAIDLGASSIGWVVMESMPDAVFGAQSRFRNAGVRIFEAGVEGQLESGKDESRGKKRREARSARRRLDRVSRRLGDLFRMLQRHSLLPQFPPEELRHAGDDAAPELSRRFARAGARDRLIAALDVQLVRKWQERLRAEGKTEAEMRSLPRKFFYVLRAKALDEKLDLHEVGRAIYHLAQRRGFLSNRLARGKDEKDEKEMGKVKERIGHLRKMMEEQGSRTLGEYLAGLDPDEERIRKRWTSRQMYQHEFDTIWAAQQAFYPDILTDELKAKISKRIFFQRPLRSQKHLIGECELEHGQKRAPMAIMAAQRFRMLQQVNHTRVITKDGEVRWFTPEERQALLNVLDVDGDLKFTKAKKLKALSNIDSFNFEEGGEEKFLGNRTAAKIAPVFGVRWNEFTDAEKDEIVNDLRSFEKEEPLVKRAKDHWKLSEEQARKFAGIKLEDMYCRLSRRALRKLLPLMEQGMAYMTAVTEVYGPKQAAEAMDSLPRIEQAMPELRNPVVFRALTELRKVVNGIVRQYGKPEVIRVELSRDLKRSRPERVAAWKKNRAIEKDRDNAAARITSEAGVQNPTRADEQKVLLAEECDWACPYTGKSITIQGLFGPEPQFDVEHIIPFSRCLDDSFMNKTLCDIEENRNVKRNRSPWEAYGSNPEKWEQIMQRVKRFRGDGRLPKLERFALREEELEKILEDFATRQLNDTRYASRLAVKYLELLYGPEAQKRKIVQVGRGQITAYLRSELGLNAILGDGDRKSRDDHRHHAVDAIAIVLTDPATVKMMSDAAAGAMSARRRRFAPIPPPWERFLNDAHLAIEAINVSHRVSRKVNGPLHEETFYAPIRSCGDGSEIGCYHKRKPLSSLSEGEVENIVDPVVRATVKAKLEQTGKKAPKDAFADETNLPCLQAKDGRRIPIRKVRVKTSVNAFSIGKGPGQRHVVTDTNHHMEIIETKDKKGNVKWEGRVVSRYEAMRRLRAHEPIVKRDHGPEKRFVFSLACGEMFEIENEELAVRDRFVVRGISQYAAGQCVISHVRPEDARKVPDMRKTGDYRRITPNELRKADCRKVTMTPLGEVRNAKD

SEQ ID NO: 8811 - protein, 1090 aa, synthetic construct
  REGION 1..1090: note = Synthetic
MVTTKGGKYILGIDLGANSIGWALLEAGPSKEGDGKLKPFAIKKAGVRVFEAGVEGDIESGKDESRSVSRRNARGARRRIERTARRMSHLFHLLQKAGFLPAGDGTALAHKEKGKHTAEELREFRMKAAAERHKIVNEFDLQFLAKLGSKDELAAKKLPYLLRAKALDKKLEPFEFGRALYHLGQRRGFLSNRKANSKKDDELGKVKQGILELEGKMEELDARTLGEYFSKTNPEEVRIRSRWTSRKMYDDEFNSIWGAQSKHNPKLDDKLKKAIHRAIFFQRPLKIQHHLIGKCPYEQGRRRAPWAILDAQMFRTLQQVNNSYLISPEGEVLEFTPEWRKTLLDELDKKNEIKFSAAKKLLGLKKEYQFNFEKDGKGEFLGNSTAEDLIDIFGEEKWNGFSREQKDEIIQDVLSIVSEDGLAKRGREKWGLSGEKAKEFGQLQLEEGYCGLSRQALKKLLPRMEKGKKYMEAVKDEYGTVVSGDKFEALPPITEVLPDLKNPTVKRALNELRKVVNAIVREYGKPDIVRIELAREMKKNRKERKSIWDRNQEQRTWREKAAEEIIREAGIKDPKRADIEKYLLWQESNCQCPYTGKEISIKKLFSGDVDVEHIIPFSRCLDNSFLNKTLCLAEENRNKKKNFTPFEAYAGSDPDQYAKILEGVKKFEGDAAKEKLRRFRMEHIKDFDDFTETQLNDTKYASKEAKKYIGLLYGTEQLSRVQASKGQITADVRNVFNLNKVLGDGGEKNREDHRHHAVDAVAIAVTDRSLVKMLSSSAAKAEKEFSPKKFDRAKIEKLWPSFFEDVKESIMAINVSHRVSKKVNGRLHQDTFYSPPKKDEQGKSYCCVRKPVARLSKGDIEDIMDPAVREAVQKKLKELGGDPKKVFQDPQKHPFLTAKDGRKIPIHKVRVKNIGSPFQVGGQGRERFVSSDTNHHLEIVEVKDKKGNMKWDGHVVSQFEAMRRLRGGEPVVKKDHPGEKFVCSLAQNESVQLKDDRGNQVVCTVKGISQLSAGPIIITLRYNSDARPTSVYQQQIKKRKELKRTKDEKLAEELSSEMPVFIFRGPESLRESNGKKILVDPLGNIRWAND

SEQ ID NO: 8812 - protein, 1079 aa, synthetic construct
  REGION 1..1079: note = Synthetic
MGEPNSSSFILGLDLGANSVGWALFRAQQGGDGRLNPVAIEQAGVRVFEAGVEGDIEKGKDVSRAIDRRTARLARRRLDRLARRLNALYAILRRAGLLPPIAEPTPPPPPPNRKRTARERRELRIAIAQRRDKSLAELDKALVSKWQARLRSGGAPEEKVRLVPHVLPYLLRARALDEPLTPHELGRALFHLGQRRGFLSNRKSTPKKDEDLGEVKSHIHELEEKMAGQTLGQYFAALDPHEERIRHRWTSRQMYNDEFEKIWSAQQPHHAALLADELKKSTYRAIFHQRPLRIRKEFLGNCECERDRKRAPIALLAAQRFRMLQMVNHTRILWNGLERPLTTEERAKMIEALESQGDLEFGKAKKLLKLGRSEKFNFEEGGEKRFLGNRTAAKLRGIFGERWDSLLPKQRDDIVNDWLSVQKDWVLAKRGMAAWGLDKEAAAELGALQLEDGHCRLSRQALAKLLPLMEAGEPYTTARLKVYGEQYAAKPVDELPAVAKAVPELRNPAVSRALTELRKVVNAIVRRWGKPAAIRIELARDLRNSRDKRQQIWKKNRENEKAREEAARKVLAERGNPNPSPEDIKNVSRADVQKVLLAEECKWICPYTSHGISMAALLGPQFEIEHIIPLSRSLDDSFMNKTLCEAGENRERKRNHTPWEAYHADPKWDTIISNVKRFRGSAARVKLGRFLMDDEAMKKFLAENSSNQLNDTRYATKLAKEYLGMLYGDEAASRVQASRGGVTAFLRNEWKLNSILGDGGEKVREDHRHHAVDAVAIGLTDPATVKMLSDAAARAVREGRRRFAPIQPPFDGFLDAVRASIAQIIVSHRVARKVSGPLHDETLYSKMKKDEEGSPCVHMRKRIEDLNKPDQVEAIVDRVVRERVRAKLQELGGDFKKFADPGNHPYMETRDGRRIPIHKVRIRDRRSTVPIGEHARERSVWLRNNHHVEIVEVKDKKGHTKWEGKMVTLFEAKRRLNGREPIVRRDHGEGKQFLFSLGHEETVRLTLDGGVGFYKVTKFSESANERIEIAFRRNRDARLAKNLPKGKEGLLRMPPDSLRKAELSKLTVDPLGELRRAND

SEQ ID NO: 8813 - protein, 1073 aa, synthetic construct
  REGION 1..1073: note = Synthetic
MSDTKNGGYILGLDIGVNSIGWAILKADENLNPTSIEDAGARVFEAGVEGDIESGKDESRNLKRRDARSIRKRLDRNARRLNEVFYRLQTAELLPKSNTKGNQTGEEKQRVLKAKTRHEIIISLDNELMKMWCEKLQTGGATKDDLRLFHLKFPYFLRARALDEKLEPFELGRAIYHLAQRRGFLSNRKALKKEDEKKGEVKKGIDELSQFMRDTNSRTLGEYFSKINPEDRRIRQRWTSRAMYLEEFEKIWAAQKSHHPSVLTDEFKEEIEDAIFYQRPLKIQKHLIGKCELETNPPRPRAPMAILDTQRFRMLQMVNNTRVIPEYGELRDLEPTERNALVDLLQTNGDTGFKEAKKKLGLSNKSVFNFEEGGEKRFLGNRTAAKLEEVFGEKRWKEFTEDEKNRIVEDWLSIQKEETLRRRGKEVWGLDDESAKKFGELELEQGYARFSKAAINKLLPLMEKGARTNHAIYEVYDPPIPEPDEFLPMITQKLMPELRNPTVSRSLTELRKVVNAVLREYGKPVKIRVELARDLKKSRKQRKELSDKMRQNQKAREEAAASIMKEAGITQPKSGDIQKYLLAVECNWTCPYTSKSITPKALFGDHPQFDIEHIIPFSRCLDDSFMNKTLCDHNENVHGKKQRTPFEAYSADPEKWNEILLRVQKFQGEAMRAKLRRFKLESKTEDAEKIFEDFATNQLNDTRYASKLAKKYLGLLYGEEAKSRIQIGRGATTAFLRNEWKLNKILNDGGEKKRDDHRHHAVDAVAIALTGPKTVKMLSDAAYRAVKEGRRWFANVQPPWDGFFEDACKVINSIIVSHRVSRKVNGPLHEETFYSPPKKDRDGKEYHSARKSLDALSKDDVDNIIDDTVREKVKSKLAEFGGGEPKKVFASPENHPHLDAKDGRKIPIHRVRVKKSVSPFKIGKGLTERYVTTDANHHVEIVEILDKKRNSKWEGHIVTQFEAIQRHRKGEPVIKTNHNDGKKFLFSLAGGEVIEIDEGNGKRGLYIIRTIAKMKQGKNEYVNLAFVPLNDARMKKEIIAKKEWRTSLIDPLRKLNCRKVSITPLGEVRRAND

SEQ ID NO: 8814 - protein, 1081 aa, synthetic construct
  REGION 1..1081: note = Synthetic
MSYILGLDIGITSAGYAVILTNHAGKPFKIAKLNTVIFPLAEDPQSGASLALPTRQHRSSRRLNRRTKFRKYRVRQLFLRYHLLNPNDISRFLSYQVPHQDIWQLRTLALQQKITNAQLFEIFYYFAGHRGFKSNRRSEIQPRGKSDADTRKVLSNITTNQEKITQYPSLGAMMAELPEFESIKHNKNYRSEDIYPLRSWIVDEIRTIGRVQKQFGHDLPASFINDYIKIFQAQRDFDKGPAKPSRFGGNLIEKMVGVDSLDHSQKRAAKLTDTFFRFQLLSQLNSLAIRYDTGQDFEPLTPDQRQVILDAASLKQLSFKQIRKKLDLTDTARFNLINYYPLKKDKTPNETVSRVEKKLFFKYGALTDLRQITSDPARIDQIGTILTTYKGDAERQKRFQKLGLTPNQIDQLLPINATGFGHLSLKTMRAILPYLADGEVYSEAATHAGYDFRDNKIDREYLRENITNPVVNRAIAKTLKVVHAVIAEYGKPDAIHIELTRELRHSHDERKKIDKRQQANQEKNQRVANQLTENGIPVTGINIIKQKLFDEQGGIDLYSGNQINAEKLFSDQLFEIDHIIPYSKSFDDSFTNKVVTATHNNQSKADRTPLEFLGTTEAAKAAFKTRVLANIQNSRKRQNLLKEHFTAEDRQAWKTRNINDTGYINRILSQYLLQNIEFTGVFTQPVVTVNGALTAYVRKRFGISKDRQASDLHHAVDAAFLACITPAYVQRLAHYSQQQENRYDQQLWQIDRDHNFNGATAISYQQAINMFPAPWPNFRAELIGRTASDPAQMMAGHLWDSYTTEEIKHLRPAIVIRMANHKVTGAAHKETIYSSKIYHQTGLGLIRTPIDKLSYDAKKDIIKNYPLAPDKSNQVVYNALKRVLKRHAGQKKSPFSDHRLTIQVGHQKQIVTHVKTTQKISSPTAVGQGIALNSRMLRIDIFLQADSQNFVGVPVYVADAVAKHLPDKAVVTDKNASDWLPIHPADQFICSVATNDLIEVKFKKPVTITNISTGEKQQRTQLLCYFSGFSIAKAQMNFRSLNGDYTINSIVLKYIQSITRFQLDYLGNYYPIKHEHRTTFH

SEQ ID NO: 8815 - protein, 1078 aa, synthetic construct
  REGION 1..1078: note = Synthetic
MGYLIGLDIGITSVGYAVLQTDFKGNPYKILLMNTVIFPVAEAPKTGESLAAPVRQKRSSRRTNRRTKFRKLRVQKLFVRFGLLESADVATFLNQKVPHQDIWQLRKDALNRKLSNRELFEILYFFVGHRGFKSNRRSEVTGKQPKDNQVVLTSIHDRGNTLNDFDSLGEMMQELPEFKTIKHNKAYRPDNTIYPLRAWIEHELSAIFSVQQKNNRQITDNFITQYLDIFRSQRDFDQGPAAPSRFGGNMIERMVGPDSLDAHEKRAAKLTNTFFRFNFLSTLNNLKIQLTLGAEFHPLTTPQREIVLQAATLKSLNYKQIRHKLQLPDSARFNLVPYQSNEDPIKTESKHYLFKRKALTQIEAVTDNPQLIDKIGTILAYFKGDKTRQEKLSALNLSRAEIKQLLPINQPGFGNLSLKTMHKILPYLEQGHLYHEAAQLAGYDFQNNLVDRQYLRDNLKNPVVNRAIGKTIKVVNAIIKKYGDPDAIHIELTREIKHSHEERQKIARQMNTNMDQNDKVAEHLRENGIPVNGQNIIKSKLFYEQKGIDLYSGQQINEQDLYTEDHYQVDHIIPYSISFNDSFTNKTVTRTSNNQNKANRLPLEYLSEEKQDAFRARVMSNISNYRKRQNLLKEGITEDNRQQWKTRNINDTGYINRLLSQYLRNNVQFTKKSHNPVFTVNGATTAYIRKRYGIIKNRQATDLHHAVDAVIIGCISNTFVSRLAKYSEAQEARYHKQLWQITQYRQEHKDLSTIEYQELIKQFPLPWPDFRHELMARLSTDPAKMMAHHTWEHYTDEEISQLKPAFVIRSANHKVTGSAHDDTIYSKKLYDQRGVGLLRTSLQNLKYDSKKDGIKNYERLKDGSNSLVYDSLLRALKEHDGNAKKAFPDNQLLISTGNHQQIITHVKTVKKITHPIEVNRDTAIAIGGRMIRVDIFKQAKAQKLIGIPVYVNDTVKPTLPNRACTSGKRYSDWYQLTRQDQFLCSLVSNDLVLVETASPLKVTNNITNEEVQTTQLLCYFSSFNIANAQINFHSINNDSSINPIVLNKVTYLTKYQLDYLGNYFPVKHESRKTFNRKR

SEQ ID NO: 8816 - protein, 1614 aa, synthetic construct
  REGION 1..1614: note = Synthetic
MKILGLDVGVTSVGGGLITIPDTFEDWGKHGGINWLGSRIIPTDGDYLQKFESGVPAETKAAFRTAKRGSRRLKQRYILRRTRLIKVFKILGWASSEFPENFKEKIKKEEDFKFNISSYLPFEQTSIDEATKLLGVKNKKEKLACSEDWVIYYLRKKALSEKISLSELARIIYMFNQRRGFKSGRKDLKDVPEDSVEKKRVEILKIKEVIQLGDEKDKNGKYKFQIIPDNSVAKERVEPWEETRHKKPDWEEKEFTFLITVKNGKQLKPKTPDKDSDHDLLVTALDNKITDSGKTAGAYFFDELVNDKNYKIRQQIVKRIRYQEELKAIWNKQTEFYAELNDKTKLREISAALYPTQTKTEKSKLKEILSNDLYHVIANDIIYYQRELKSQKGLIQGCQYEKIEICKNNEKIKVGVKAAPRSSPDFQEFRIWQTIHNIKIYEKEQIIDGRTRIDVDVTKEYLGNNENGFKTKEKLFDFFDGHGGVEAKQVFKTINDSCSSKLSDKTHKINLFYKDGVTVKGNEIKEVFRKAFRKANYAEEGEQILNDAKRLNSLWHIFYSISSTDAEKSQKGIKTALGNPKLGFNFPEKIIESIVSIPESAKQYASLSSKSIRKFLPIMRCGKYWKWENIAPEYQAKIENLIKKGWNNVDKNTGEIIGVEYPFANAEQVQGLATWMAAYVIYDRHSERSASEKYTSYEQIDVMKLVPNNSLRNPLVEQIVRETLFVVKDVWKKFGQPDEIHIELGRDLKKNAEERKRISDSNTTNQQEKERIKRLLKELLNDQFEEYLEDGSTKNSRFETKPNPESPLDVEKFKIWKNLAGNLPEDIDKFFKGKDAKEKDKLPSSAEIKRHALWLTQKCKSPYTGKIIPLSKLFTESYEVEHIIPRSKMKYDAKENLVISETEVNKAKGHRLAAPFISECKGKCKHGNTEYALLEYADFETHCKAIFRGKKLKNLLATEVPEDFISRQINDTRHITRKISELLQPIAKSENGLVFTIGSITSDLKREWGLTKEWKRLMLPRFQRLESITGESYISVNAKNANDFDIHVPENPDLDLKRIDHRHHALDALIIAATTREHIRYLNSLNAVDNNEELKKVKQTLVKSKVREFSLPWERFTEDAKNALSTVIISIKAKNKVVSKPKNKYQKWVEKDGKWKKEFVAQKPPKEEGKKWLSVRKSMFKEPQGIIHLKEVYDEKSIVKAIEIQINRMKVQDTPAMKTASYIYDQEAKEIVKRLILEYDFDIEAIKKHLKKHPLKDASRQEYKTIKVAKFEEYASKRVSLDASFDSKKINKIPYANHIKEVYAEKSIVKAIEIQINRMKVQDTPAMKTASYIYDQEAKEIVERLIREYDFDIEAIKRELEKRPLKDVSGQEYKAIKVAKYTKDSKSPSPLAEILKKHLEQYNEGDKEHPELAFHREGIEVLNKRLKQPIGKVTIYEKKSSEDKFKNNYVEVDKGANVYFIMYEDLKTKERNEMYSIAAHKVVERVVSGEPIAENKEGYKTIILSPDQLVYVPTPEEIRNPELINLETNDPNKRKLIFERVYKMVSCTGSKCEFIPHNISKAIIDTVELGSSNKNQRAWDGKVELKPKREDSGTMIKEICQKISIDRLGNIKLA

SEQ ID NO: 8817 - protein, 1016 aa, synthetic construct
  REGION 1..1016: note = Synthetic
MASLEFSLDVGHSSIGWAVFQSDPFQPLGAGSVIFGADDCLAKKRRDYRRQRRHIRSTRQRIERMKQLLSHVGFLTREQLDQPGTAWPWLKAAEVLKPEGGVKLSAQELWDVLRWYAHNRGYDGNRAWARDETEAQEDTAREQAARQWMQDHNTQTMAETVCAVLDVGPGKRSDGGDKRSSNLRFKGRGVAFPRSVVTSEVRHILENHQGKLPGLDSRTIRILMDDARHENLAAEAGIRLPHRYEGGLLFGQLIPRFDNRIISSCPVTYEREYARALDEGKSEDEAKHQAVRQAKVPAKKSREFLLFRWAMILANVQVADASGTRPLSVEERQSLHQLMVKSGKLTKREFLKTLDATVGSPRHNGSALLMPPDADKALVLRPEKDALKRLSGRAPHARVVMKQAVKDVFAGRHPMAEGGALFRSEELRALQLRRTVEEKTNNHLLRHRLLILRRLVKDMLATYAGNDPSRISQVTIEVNPDLRSFSGMTAEEKKQEMGQRLGDFKKVVQKLRGDLPEVTAISAGLIRKARIAQDMNWTCPYTGMEYDALDLLHGHVDKDHIIPRSLRPSDSLDSLVLTLRTINEMKGQRTAVQFIKEFEGREVQDGKKRSLEILPWSQFQKLVESLDAKGIHDQDRARKKRRKALLLQEHYTEKEFVPKDLTQTSHLVRLAAEELKKEFGGVQCSTRIVSMPGSVTAETRKAWKLEACLAQANPEVAELRERRKTEPAPVSIKQELRDISHLHHALDACVLACAAHYLEKKGNIWKALVQRRKSEAENLELLSTGLFKRGQDGQARLQDLPAQLKNQISRVLAECRVVQHIPSNRRGLKAEETVWRVLDSEDHHPSAEKLRKWAQLAQVELPNPDSGKVLLVKRIRHTAAGAKAPKNLLHQGSEFWWAYEVVALSKLVGPGASGKLRKIKGAKQIGDNFAVTLGPKMEVIPHHQVQERWKGLGCPRYLRNGQIIEMPTGKYSGAWKVFSIKNARQGILLDIARADSPRAKQGNPGTRINVLLKTLV

SEQ ID NO: 8818 - protein, 1166 aa, synthetic construct
  REGION 1..1166: note = Synthetic
MHVEIDFPHFSRGDSHLAMNKNEILRGSSVLYRLGLDLGSNSLGWFVTHLEKRGDRHEPVALGPGGVRIFPDGRDPQSGTSNAVDRRMARGARKRRDRFVERRKELIAALIKYNLLPDDARERRALEVLDPYALRKTALTDTLPAHHVGRALFHLNQRRGFQSNRKTDSKQSEDGAIKQAASRLATDKGNETLGVFFADMHLRKSYEDRQTAIRAELVRLGKDHLTGNARKKIWAKVRKRLFGDEVLPRADAPHGVRARATITGTKASYDYYPTRDMLRDEFNAIWAGQSAHHATITDEARTEIEHIIFYQRPLKPAIVGKCTLDPATRPFKEDPEGYRAPWSHPLAQRFRILSEARNLEIRDTGKGSRRLTKEQSDLVVAALLANREVKFDKLRTLLKLPAEARFNLESDRRAALDGDQTAARLSDKKGFNKAWRGFPPERQIAIVARLEETEDENELIAWLEKECALDGAAAARVANTTLPDGHCRLGLRAIKKIVPIMQDGLDEDGVAGAGYHIAAKRAGYDHAKLPTGEQLGRLPYYGQWLQDAVVGSGDARDQKEKQYGQFPNPTVHIGLGQLRRVVNDLIDKYGPPTEISIEFTRALKLSEQQKAERQREQRRNQDKNKARAEELAKFGRPANPRNLLKMRLWEELAHDPLDRKCVYTGEQISIERLLSDEVDIDHILPVAMTLDDSPANKIICMRYANRHKRKQTPSEAFGSSPTLQGHRYNWDDIAARATGLPRNKRWRFDANAREEFDKRGGFLARQLNETGWLARLAKQYLGAVTDPNQIWVVPGRLTSMLRGKWGLNGLLPSDNYAGVQDKAEEFLASTDDMEFSGVKNRADHRHHAIDGLVTALTDRSLLWKMANAYDEEHEKFVIEPPWPTMRDDLKAALEKMVVSHKPDHGIEGKLHEDSAYGFVKPLDATGLKEEEAGNLVYRKAIESLNENEVDRIRDIQLRTIVRDHVNVEKTKGVALADALRQLQAPSDDYPQFKHGLRHVRILKKEKGDYLVPIANRASGVAYKAYSAGENFCVEVFETAGGKWDGEAVRRFDANKKNAGPKIAHAPQWRDANEGAKLVMRIHKGDLIRLDHEGRARIMVVHRLDAAAGRFKLADHNETGNLDKRHATNNDIDPFRWLMASYNTLKKLAAVPVRVDELGRVWRVMPN

SEQ ID NO: 8819 - protein, 1161 aa, synthetic construct
  REGION 1..1161: note = Synthetic
VECFNPAVKAAGVVVLERKSKPYRLGLDLGSNSLGWFVTRLEKRGDRLEPIALGPGGVRIFPDGRDPQSKASNAVDRRMARGARKRRDRFVERRKQLLEALVRHGLMPAEAAARRALAGLDPYQLRVKALAEALPAHHVGRALFHLNQRRGFLSNRKTDNKKTTEDGAIKQAASRLRDSMAEENAETLGVFFANRHLSEKYLARQDKLRAELKRIGKDHLTGNARKKAWAKLRKRMFGNDVLDAGEAPDGVRARANITGTKASYDFYPTRDLLIDEFNKIWDAQAPHHPTMTEAARDEIAHIVFFQRPLKDAIVGKCTLAPATRPFKEDPEGYRAPWAHPLAQRFRILSEARNLEIRETGKGSRKLSKEQSDRVVLALLGNKEVTFDKLRTLLKLPVEATFNLESERRTALDGDATAARLSDKKGFGKAWRGLALERQIAIVEKLLEAEVEADLVDWLERDCGLEPEAAARVANTTLPEGHCRLGLRAIKNIVPILQDQLSDDGVAGAGYHEAAKRAGYDHAKLPSGEQLDYLPYYGQWLADAVVGSGDARDEKERQYGQFPNPTVHIGLGQLRRLTNELIRNYGPPAEISIEFTRALKLSESQKVEVQREQRKNQEKNKARAAELEKFGFPANPRNLLKLRLWEELNLRDPLDRKCVYTGEQISIQRLLSEEVDIDHILPVAMTLDDSAANKIVCLRYANRHKRKQTPVEAFGGSPTIDGRRYDWEEIAARAAALPKNKRWRFDANAREEFDKRGGFLARQLNETGWLARLAKQYLGAITDPNQIWVVPGRLTSMLRGKWGLNSLLPDHNYAGVQDRAEEFLASTDDMEFSGVKNRADHRHHAIDGLVAALTDRSLLWKMANAYDEEREKFVIEPPWASMRDDLKAALEKMVVSHKPDHGVEGKLHEDSAYGLLKQPELVDDGDKDGANLVYRKPIESLNDNEIDRIRDRRLRDLVRAHVDAEKAKGVAIADALRQLKGPSDHPHFKHGLRHVRLLKKEKPDYLVPIADRRTGEPYKAYSAGENFCVELFETADGKWDGEAIRRFDANKKNAGAKTPHAPRWRADHLGARLVMRVHKGDLIRLEHDGQSKIMVVHRLDAAKGGFKLAAHNETGNLDKRHATNNDIDPFRWLMASYGTLKKMSAVPVRVDELGRVWRIDPR

SEQ ID NO: 8820 - protein, 1147 aa, synthetic construct
  REGION 1..1147: note = Synthetic
MLERLPQPYRLGLDLGSNSLGWFVTTLQQRGDRFEPVGLGPGGVRIFPDGRDPQSKASNAVDRRMARGARKRRDRFVLRRSQLMDALVKHGLMPEETAARKALAGLDPYQLRARALVDRLPAHHVGRALFHLNQRRGFLSNRKTDNKKNSEDGAIKQAASRLRDSMASQGAQTLGEFFADRRHSDTYAERQTAIRAELQRIGKDHLTGNARKKAWAKVRKRLFGDDVLDPAMAPESVRARAIITGTKASYDFYPTRDLLLQEFHAIWRAQAPHHATMTEGACREIERIIFYQRPLKDPIVGKCSLDPATRPFNEDPEGYRAPWAHPLAQRFRILSEARNLEIRETGRGSRKLTKAQSDAVALALLGSKEVKFDKLRTLLKLPAESKFNLESDRRAALDGDATAARLSDKNGFGKAWRGFPLERQIAIVEKLMTVEVEAELVDWLEQECGLGPEAAARVANTSLPEGHCRLGLRAIKKIVPVMQNEVGDDGVSGAGYYEAAKRIGYDHAKLPTGGDLDYLPYYGKWLADAVVGSGDARDGKERQFGQFPNPTVHIGLGQLRRLVNELIRTYGPPTEISIEFTRALRLSEDQKAQVQREQRKNQDKNRARAAELEQLGFPANPRNLLKMRLWEELNLRDPLDRKCVYTGEQIGIERLLSEEVDIDHILPVAMTLDDSAANKIVCMRYANRHKRKQTPFEAFGSSPLVQGRRYAWDDIATRAAALPRNKRWRFDADAREQFDKRGGFLARQLNETGWLARLAKEYLGAVTDPNRIWVVPGRLTGLLRGKWGLNALLPDHNYAGVQDKAEAFLASTDDMEFSGVKNRADHRHHAIDGLVAALTDRSLLWKMANAYDDEREKFVVELPWPSMRDDLKAALDKMVVSHKPDHGVQGKLHEDSAYGLLDRPEPVDDDDREPANLVYRKAVETLNENEIGRIRDRRLRDIVRDHVDAAKRNGVALADALRQLTEPSDNPHFRHGLRHVRLLKKEKTDYLVPVVDRATGRPYKAYSAGENFCVEVFETADGKWSGEAVRRFDANRSNCGPKTPHVPRWRTESAGARLVMRIHKGDLIRLEHEGRTRIMVVHRLDAAAGRFKLAAHNETGNLDKRHATDNDIDPFRWLMASYGTLKKMAAVPVRVDELGRVWRIDPR

SEQ ID NO: 8821 - protein, 1082 aa, synthetic construct
  REGION 1..1082: note = Synthetic
MPQVRRPYRLGLDLGSTSLGWFLVWLDGRGNPKALGPGGVRIFHDGREAKSRKSSAVARRVARGMRRRRDRYVRRRAALLQALVDYGLMPADEGGRKALEALDPYDLRVAGLDGPLPLHHFGRVIFHLDQRRGFKSNRKSEKGDGEAGLIKQAATRLKAAMAEEKARTLGEFLHHRRLKGETVRVRLKGAGAKASPTRDDLAGGLDGDGRAKASYDFYPTRDLIEVEFDTLWAAQAAHHPELTAAVQAALARIIFYQRPLRSPPPGKCALLPARDKDDLEGYRAPRAHPLAQHFRVWQEVRNLRIEMAGTPQRRLMPEEGELVGKALLAANSLSFDKMRALLKLPAEARFNLESEKRDRLKGDETAERLAAKKIFGKDWRHFPPAKQWAIVDRLLNEEDEPTLIDWLVTEAGASRSVAAAAAGTALPDGYGRLGLRALKILVPLMAGGLSYDEACVEGLGKSHSVKDRGDLLPRLPYYGQWLQDDVVGTGDPWDTPEKRFGRLPNPTVHIGLGQVRRIVNALIDRYGPPAQVVVEMTRDFKLSPRQLAEVEKEQAANQRRNDARREKLAELGVAVNARNLLKLRLWEELSPRDSIERDCPFTPEKIGLRRLFSENGEVEIEHLIPFSISFDDSAANKTVALRRANRDKGNRTPWQAFHNDPRYDWPGIAARAAQLPKNKRWRFAPDALERFGDEEGFLARQLNETGWLARMAKDYLSAVTPANQVWVIPGRLTALLRAKWGLNGLLPNNYGDSKSRLDHRHHAIDALVAALTSRRLLLLMASTYDEERDRIVVPLPLPDLHDSLSAWRDRMTVSHKADHGAQAGQRTGNATSGRLHEETAYGLVRDPAAEDGMNLVYRKTFEALTEAELPRIRDRRLRDLVAAHWAEAKPSGQKLADALGDFARMVKDPHIANGIRRVRILKKEKAEFLVAIAPDGGGPAYKAYAAGDNAFIDIIETADGKWIGEATSVFSANTPSNQPAWRQWPDASFVMRVFKGDLLRLNWKGRDCIMIVRRLDAAANRFKLALHCEAGSLDKRHDAEDDPFEWLMASYSTLKAMGAQKVRVDELGTVWRLDPADALKRL

SEQ ID NO: 8822 - protein, 1064 aa, synthetic construct
  REGION 1..1064: note = Synthetic
MKRTSLRAYRLGVDLGANSLGWFVVWLDDHGQPEGLGPGGVRIFPDGRNPQSKQSNAAGRRLARSARRRRDRYLQRRGKLMGLLVKHGLMPADEPARKRLKCLDPYGLRAKALDEVLPLHHVGRALFHLNQRRGLFANRAIEQGDKDASAIKAAAGRLQTSMQACGARTLGEFLNRRHQLRATVRARSPVGGDVQARYEFYPTRAMVDAEFEAIWAAQAPHHPTMTAEVHDTIREAIFSQRAMKRPSIGKCSLDPATSQDDVDGFRCAWSHPLAQRFRIWQDVRNLAVVETGPTSSRLGKEDQDKVARALLQTDQLSFDEIRRLLGLPSDARFNLESDRRDHLKGDATGAILSARRHFGPAWHDRSLDRQIDIVALLESALDEAAIIASLGTTHRLDEAAAQRALSALLPDGYCRLGLRAIKRVLPLMEAGRTYAEAASAAGYDHALLPSGKLSPTGYLPYYGQWLQNDVVGSDDERDTNERRWGRLPNPTVHIGIGQLRRVVNELIRRHGPPAEITVELTRDLKLSPRRLAELEREQAENQRKNDRRTSLLRKLGLPASAHNLLKLRLWDEQGDVASECPYTGEAIGLERLVSDDVDIDHLIPFSISWDDSAANKVVCMRYANREKGNRTPFEAFGHRQGRPYDWADIAERAARLPRGKRWRFGPGARAQFEELGDFQARLLNETSWLARVAKQYLAAVTHPHRIHVLPGRLTALLRATWELNDLLPGSDDRAAKSRKDHRHHAIDALVAALTDQALLRRMASAHDDTRRTIEVLLPWPTFRIDLETRLKAMLVSHKPDHGLQARLHEDTAYGTVEHPETEDGANLVYRKTFVDISEKEIDRIRDRRLRDLVRAHVAGERQQGKTLKAAVLSFAQRRDIAGHPNGIRHVRLTKSIKPDYLVPIRDKAGRIYKSYNTGENAFVDILQAESGRWIARATTVFQANQANESHDAPAAQPIMRVFKGDMLRIDHAGAEKFVKIVRLSPSNNLLYLVEHHQAGVFQTRHNDPEDSFRWLFASFDKLREWNAELVRIDTLGQPWRRKRGPETGSEDATRIGWTRPKKWP

SEQ ID NO: 8823 - protein, 1062 aa, synthetic construct
  REGION 1..1062: note = Synthetic
MSAARPYRLGLDLGSNSIGWFMVWLDAVGEPVELGPGGVRIFPDGRDERSRESNAMARRLARGMRRRRDRFVRRRTRLMAALIESGLMPAEAAARKALEPLDPYGLRAAALAGPLPLGQIGRAIFHLDQRRGFKSNRKSDKADGESGLIKQAAGRLEEAMKAANAPSLGHYLAGRKAARLPVRTRMQGSGAKASYDFYPMRDMVEAEFEAIWAAQAPHHPEMTAAAHDRLHRLIFFQRPLKPVPAGKCSLSPAVARDDAEGFRCPRAHPLAQRFRIWQEVRNLRVQIAGQADRALSIEEGDRIALALLGSNGVSFDKMRALLKLPSGSRFNLESEKRKELKGDETAKCLVNGKLFGKAWRAFPLERQIEIVTRLIEEEDESRLIDWLRAETGVDAEVAEKIAGTLLPDGYSRLGLRAIKAILPEMEKGLPYDKACITGLGTAHSPRPTGEQRDRLPYYGEWLQNEVMGSGEPSDPPEKRFGRLPNPTVHIGLGQLRRLVNALIERFGPPAEVVVEMTREFRYSPQKLKEIEQEQAKNQRRNDLRREELTKLGQAVNHRNLLKLRLWEELNRNDPADRHCPFSGERISVETLLSDAVEIEHLIPFQISFDDSPANKTVAMRYANRHKGRKTPHQAFGNSPTIEGKSYLWSDIVARAALLPRNKRWRFAPDALERADREGGFLARQLNETGWLARMAKDYMGAVCDPNKVWVIPGRLTALIRAKWGLNFSDAKDRNDHRHHGIDALVAALTSRSLLQAMASAFVEEQDRIIVPEPWPGFRDQVLRWRNTMTVSHKPEHGTAGRLHEDTAYGLVRDPAAEGGKNLVYRKAFTSLTEKEIGNIRDRRLRDMVAVYWATAKASGIKLDQALQDFAAEVRDRDPHVRDGIRHVRLLKPEKADYLVPIKGPDGVPYKAYAAGENAFIDILETADGRWIGEVTTVFAANRPDYRQAWRDDAGLRFIMRVFKGDLLRIEINGQHKIVVVRRLEPSSSELRMADHFEAGKLADRHANPDDSFEWIRKRYSALKHMNAERVRVDELGTIWRIPPEEGLRHILNREQRDDRPRR

SEQ ID NO: 8824 - protein, 924 aa, synthetic construct
  REGION 1..924: note = Synthetic
MEKIGAGTLGQYLWSRQKERSGVRARGKVAGTKVTYDFYPTRRLVEDEFDAIWAKQSPHHPSMTAEAREAIHDAIFFQRPLKKPPVGKCTLKPAGVPFEQDPEGYRVAWAHPLAQRFRILQEVRNLAVGPVGYSPRKLAKEEGDAIVLALLQSNKVSFDKMRGILKLPADQRFNLESERRAELKGDETAERLSHKTRFGKAWRGFSLDRQAAIVDRLMNEEDETKLVAWLRRECDLDVETAARIADTPLPEGYARLGLRAIRKLFPLMNDKGLNYPDAAREAGYDHANAPTGEILDRLPYYGRWLPNAVVGSGDPRDVKEKRFGRFPNPTVHIGLGQLRRLVNTLIEELGAPEEIVVEFTRSLKLSPEEKRQVQTEQRRNQEKNERRVAEIKRLPGYRDYDPTPRDLLKMRLWEELNPRDPLDRKFPYTGDNISLAQLMSAEVDIDHLIPYTVGLDDSPANKIICFREANRHKRKRTPFEAFGSSPAIGTVTYNWDEISQRAANLPRNKNWRFGPDALDRYKEMGGFLARQLMETGWLARVARQYLGAVCDPYSIWVIPGRLTAMIRARWGLNSLLPDHNYPGVQERDETFRAATDDLEFSGIKNRADHRHHAIDAFVAALTDRSLLQRIASRYDEEREKVDIPEPWEGLRDELKARLDAMVVSHKPDHGKGGRLHEDTAYGLVKEPEKEAGNLVRRKDLASLTENEIELTRDIRLRERVRDHVYAARAAGMDLKGALADFVKSSEGDPHTRHGVHRIRLLKVEKPEYLVPVAGADGTLYKAYSAGENFCVEIYDAGDGRWQGEAIRRFDANQPGYRPRWQHEFPDARLIMRVHKGDLLQLDDGTGPKIWVVYRLDASAGRFKLAPHNETGNLDRRHATDTAIDPFRWLMASYGTLKRMNAGRVRVDEIGRVWPITPDDARKTK

SEQ ID NO: 8825 - protein, 1049 aa, synthetic construct
  REGION 1..1049: note = Synthetic
MKKETNRPYRLGLDVGTNSLGWFMVWLNEAGEPIGLGPGGVRIFPDGMTNDKKASNAAERRLARGQRRNRDRYLERRRTLMSTMIDGGLMPKDEAARKALVDLDPYDLRARAITEKLPLHHIGRALFHLNQRRGFKSNRKSDGANDEKGAIKEASSRLREAMAAANAQTLGVFLNGMHREREGVRVRNTSSGNKATYDFYPTRDLLVDEFEAIWRQQSKHHSQLTDTVRERVCDTIFFQRPLKSPPIGKCTLDPAQNPGDADGFRLAKAHPLSQRFRIWQEVRNLTVGETGSTPRDLTKEEADTIALALLQSNAVTFDKIRKLLRLPEGARFNLESERRKELLGDQTAKRLGAKKLYGKTWRGFPLERQIEIVERLLSEQNEEALIEWLVFETGVDRDLAEQIADAPLPDGYGRLGHRAVAAILPYMQAGMRYHDAALAAGYDHVKAPTGEILDRLPYYGEWLQDQVIGTGDHRDKKEDRWGRFPNPTVHIGLGQVRRVVNALIKKYGPPEQIVVELARNLKNSKKQKDEIEKQQKSNQRKNDRRRDQIKAAGHNVNHDTLLRMRLWEELNEDDVLDRRCPFTGEVISIKRLFSPEVEVEHLIPFQTSWDDSAANKTLCLRDANRAKGKKTAHDAFGHSPMINGRAYDWVEISARAANLPGNKKWRFEPDADKRFEEQGGFLARQLMETSWLARLTRHYLSCVTNPNEVWVIPGRLTAMIRGKWGLNSLLPDHNFKNAKNRADHRHHAIDAVVAGLTDRGLLQGMSRAYDDARDKIEVPLPWETFRDDLDAVLKRMIVSHKPEHGREGKLHEASAYGLNRHQQEGEGNLVYRKALTDLNGSEIARIRDDEIRTTLQAYIDENKTEGQKLVEVLAAFGNRTDLPFAPHGIRHVRLTKKEKLEYLVPIRDKEGAAYKAYSSGENLFVELYETSDGKWHGEPVTVFQANQKGFKPRWHSQFPEAKFIMQIYKGDLLRLEREGESQIFKVYQLEASANRFKLALHNEAGSLGTRHNDPDDPFRWLIASYNPLHTMGAQKVRVDALGMPWKHQP

SEQ ID NO: 8826 - protein, 1074 aa, synthetic construct
  REGION 1..1074: note = Synthetic
MAEQRPYRLGLDLGANSLGWAMIWLDEGPSGLGPAGVRIFPDGRDPQSKSSNAVSRRVARGARRRRDRYLQRRKELMAALIEAGLMPAGEAERKKLQDRDPYEIRARGLDKRLSLHELGRALFHINQRRGFKSNRKTDRQNEEGGVIAKAAGKLEQMMLEEGARTLGELLAGRHSGRLGVRARPEARPSNVSSGAKAAYEFYPTRDMLEQEFVKLWEVQRRQHPELTAELHGKLHHIIFFQRPLVPPQVGKCALDPAKRPDDREGFRCPWAHPLAQRFRILQEVNNLTAGPVGERKRKLTAGERCKALHELLQTGAVTFEDLRTALKLESGWIFNLHSDRRDELKGDETAAALCSSKEALGKFDRKIWHSFPAERQAGIVERLLEEEDEEELIAWLIEETGVSKEQAYAIATVTLPDSHCRLGLRALKAIVPFMEEGQRYHQAAASAGYDHARLPTGEIRENLPYYGEILQDQVLGSGDARDPAEQRWGRLPNPTVHIGLNQLRRVVNALIRRFGPPQEIVVEMARSFKLSPDQLRKLELEQRENQRKNDDRRKELEKLGLPVNYGNLLKLRLWEELNPKDALDRQCPFTGEQIGMRRLLSEEVEIEHLLPFSRSWDDSPANKTVCLRAANRAKGQKAPYEAFGSSPTYSGQYYDWEAIKLRAKALPPNKRWRFDPDAMQRFEAGGGFLARQLNETSWLARLAKQYLGAVTDPRKIWVVPGRLTALLRRKWGLDDLLDSEGGRKNRNDHRHHALDALTAGLTDRGLLQRMAREYDEERERIVVKPPWEGFRQDVARVLEAILVSHKPDHGAQGQLHEDTAYGRIAGAKEGEGNLVYRKPFLALKETEVERIRDARLRDELQAAIGSGKAADKRLPNILAEFAKEWGERHGHGALRHVRLTKTEKPDYLVHIGDGAAPYKAYSAGANLCVELYETPDGKWRGEAVSLYQANQAGHQPRWPAEEPGARLVMRLHKGDCISLEEDGQRRYVLVKQLRARGRSMFLAEHHEAGALQTRHDDKEDPFRWRMYPYDKLRQLKAEPVRIDEIGRPWRLGRALPWQEWIERSRRLTPKPGRR

SEQ ID NO: 8827 - protein, 1138 aa, synthetic construct
  REGION 1..1138: note = Synthetic
LYRLGLDLGSNSLGWFVTYLEKRGERYEPVGLGPGGVRIFPDGRDPQSGMSNAVDRRMARGARKRRDRFVDRRKKLIAALIKYGLLPNDTRPRQALETLDPYALRKTALTDALPAHHVGRALFHLNQRRGFQSNRKTDSKQSEGGAIKQAASKLDAAMKEANASTLGAFFADMHLRQSYEERQKAIRAELVRLGKDHLTGNARKKIWARVRKRLFGNEVLPQGDAPDGVRARAHISGAKASYDFYPTRAMLLDEFNAIWTAQRAHHAAMTDDARAEIAHIIFFQRPLKPAIVGKCTLDPATRPFKEDPEGYRAPWSHPLAQRFRILSEARNLEIRETGKGSRKLTKEQSDLVVAALLANKEVKFDKLRTLLKLPAEAKFNLESDRRAALDGDQTAARLSDKKGFGKAWRGFPLERQIAIVAKLEETEDENELIAWLASECALDGAAAARVANTTLPDGHCRLGLRAIRNILPIMQNEADDDEVSGAGYHIAAQRAGYDHAKLPTGEQLDRLPYYGQWLQDAVVGSGDARDQKEKQYGQFPNPTVHIGLGQLRRIVNELIDKYGPPAEISIEFTRALKLSEQQKTEKQREQRRNQEKNKARAEELAKFGHPANPRNLLKMRLWEELAHDPLDRKCVYTGEQISIERLLSDEVDIDHILPVAMTLDDSAANKIICMRYANRHKRKMTPFEAFGSSPTIQGHRYNWDDIAARAAGLPRNKRWRFDADARGEFDKRGGFLARQLNETGWLARLAKQYLGAVTDPNRIWVVPGRLTGMLRGKWSLNALLPDHNYAGVQGKAEEFLASTDDMEFSGVKNRADHRHHAIDGLVVALTDRSLLWKMANAYDEEREKFIIDPPWPTMRDDLKTSLDKMVVSHKPDHGIEGKLHEDSAYGFVKPLDITGQTEEEDGNLVYRKAIEGLNENEVDRIRDRRLRRIVREHVDAEKKKGVALADALRQLKEPSDSYPQLKHGLRHIRILKKEKADYLVPITNQTTGAVYKAYSAGENFCVEVFETADGKWNGEAVRRFDANKKNAGPRIAHAVQWRNAEGAKLVMRIHKGDLIRLDHDGRTRIMVVHRLDASAARFKLAEHNETGNLDKRHATDNEIDPFRWLMASYNTLKKLNAVPVRVDELGRVWRIVPN

SEQ ID NO: 8828 - protein, 1058 aa, synthetic construct
  REGION 1..1058: note = Synthetic
MTNSFARCYRLGIDVGSNSLGWFVVWLNKDGSPGSLGPGGVRIYPDGRDPKSKSSNAVTRRIARCSRRIRDRYLKRRADLMAILVETGLMPGDESARKALEALDPYAIRANALDTAQPLHHVGRCLFHLDQRRGFLSNRKTEQGDAESGVIKEAAGRLRAAMEAEQARTLGEFLYRRHREREAVRVRNRSVGGKAQYDFYPLREMVLAEFEAIWLRQAEFHPEMTAQARAKIHDAIFFQRDLKPPSVGKCSLEPARDPDDADGFRCPWAHPLAQRFRIWQEVRNLEIVETGKFSRRLAKEQGDLVARDLFKSKKLTFDKIRALLGLTPAVKFNLESQKRSELLGDQTAARLSAAKLFGKSWWTLPMERQIEVVRLLLDNEDESQVIAELRTGFGLDQAAALAVSGTLLPDGHCRLGLRAITTLVPLMAAGMNYADAARAAGYDHARQQTGEQSPTGCLPYYGEWLADDVLGTGDPGDGNETRWGRFPNPTVHIGLGQIRRTVNALIRVYGPPAEVVVEMTRSFKLSPVQLAKVESEQFENQRRNDTRREELRGLGLAENARNILKLRLWEELNPKDPLDRRCPFTGESISIVRLFSEDIEIEHLIPFQDSWDDSAANKTLSMRFANRAKGKQTPHEAFSTSPRIDGFQYDWDAIVQRAASLPRAKRRRFEPHARERLGASDGFQARLLNETGWLASVAKRYIAAVVDRHKINVLPGRLTALIRGKWGLNDLLPDHNYGDSKNRKDHRHHAIDAMVAAMTDRSLLHRMSSAYDEERDKIAVPLPWPTLKADLEAKLKTMLVSHRPDHGTQAQLHEGTAYGPVKNPEQEGGNLVYRKPFLTLTEQQIERIRDRRLRDLVKAHVEAERRAGRDLKAALQSFAARKDIPGLAGEIRHVRLVKTEQPEYLVTLRDKSGKPYKSYSAGKNAYVEIFETPEGKWQGEAMLVFRANQADATMRWPEKYPGSRLVMRIFKGDLIAVDLDDRRAVMVVRHLDASNNRLKLAEHIEAGDLDKRHADGNDPFRWLMASYSTLKTLNAEQVRVDEIGRIWRVTTKGGGKAA

SEQ ID NO: 8829 - protein, 1072 aa, synthetic construct
  REGION 1..1072: note = Synthetic
MTASASKPYRLGLDLGTNSLGWFAVWLERDGAAWRPVGLGPGGVRVFPDGRDPQSGTSNAVDRRMARGARKRRDRFADRFFGRRTELIDALIQHGLMPADEKERKALESLDPYELRAKALDGPLPAHHVGRALFHLNQRRGFLSNRKAEKKEDDKGAIKQASTKLKEAMEAEKARTLGEFLWRRHQKRESVRARNIASGPKAAYEFYPTRDLFRIEFDCIWNAQAGHHVAMTDDARDEIARIIFFQHDLKPQPVGKCTLDPAKAPLKEDPEGYRCSWAHPLAQRFRIFQEARNLEIRETGKAGQKLSKEDGDKVALALLQNNKVSFDKIRALLKLPEEARFNLESERRDHLKGDELAEKLANKNLFGKAWRGFMQERQIAVAEKLLGEADEKLLVAWLESECGVDAATAGKIADARLPESHCRLGLRAIKNLLPAMEKELDADGRSGVNYPEAARRVYGDHSKQPTGEILDRLPYYGEWLPDAVVGSGDERSTKEKQFGQFPNPTVHIGLGQLRRLINALIKEFGPPEQIVIELARDLKRSQDEKRDEDARQAKNQKKNDDRKVKLTEIGIINVSGADLVKMRLWEELGELVKLCPFSGRPISLAQLMSSEVEVEHLIPYADSLDNSAANKTVCFTSANRLKGKQTPHEAFGSTPDWPAIAARATTLPGNKRWRFAPDARERLNRDGRDFLDRQLMETRWLSRLAHQYVSAVCDPRQVWVVTGQHTSLFRGKWGLNTLLPDHNFTTAKNRADHRHHAIDALVVALTDRSLLMKLTHGYDIDRDRIKIEPPWNTEKLRNDLEAILKRMVVSHKPDHGYQGKLHEDTAYGIVTNEEKDEKGKSLGNLVYRKALASLTENEIDRIRDRRLRDMVRSHVDAAAKNGVPLAKALLEFRDTVRDPHIKHGLKRVRLVKAEKPEYLVPIKDARTGKIYKSYSAGKNVFLDLIELPDGTWSGEAATFFQANQPTHALQWPAKFPGARLLMRLFKDDLLRIEYEGESRVVRVVRLEPSANRVRLAEHKETGVLQERHDNPDDPFRWIFGQYDRLKEWNAEHVRVDELGRVWRVQPKPLTKN

SEQ ID NO: 8830 - protein, 1059 aa, synthetic construct
  REGION 1..1059: note = Synthetic
MSSGNRPYRLGLDLGSNSIGWFVIWLDDNGQPCGLGPGGVRIFPDGRDPQSKASNAASRRVARGMRRRRDRYLKRRARLMDQLVGFGLMPADEAEREKLEECDPYELRASALDLRLPLHHVGRALFHLNQRRGFRSNRKTDGGDNESGPIKEGVGKLERALETESARTLGEFLWRRHRERRGVRIRNSGTATKTAYDHYPSRAMLEKEFDAIWKAQARHHPEMTDEACGALHETIFHQRPLREQPVGKCGLDPAKEPGDADGFRLSRAHPLAQRFRILQEVNNLEYSEIGRGSTRLSDEQRMTLVLALTGKNKLSFDRMRALLKLPQGAHFNLESDKRKDLKGDETAARLSHKDLFGKQWRALDRMRQWTIVEKLLATQDDDAMVDWLMAETGLNKAAARRVSGATLPEGHARLGLRAIGRLLPHMEAGLRYDEAATLEYHSHSEKRTGEVVERLPYYGAWMPNAVTGTGDQRDGNQKRWGRLPNPTVHIGLSQLRRIANAIVKELGPPTEAVVEMTRSFKLRPDRVRELEREQAANQEKNDKRDRDIAGLGHVANARNRLKMRLWEELDPNDPIDRCCPFTGEKISCRRLFSEEVEIEHLIPFSTSWDDSAANKVVAMRYANRAKGQNTPFEAFGHSPTISGRRYDWDAIAQRAANLPKNKNWRFAPDAMDRFGDENGFLSRQLNETGWFARLAKDYIEGLTGPYNVWVVPGRLTEMIRAKWGLNSLLPDHNFTDRKNRADHRHHAIDALVAGLTDRSLLQAMASAYDDERDRISVPEPWETLRKELGRALDTMTVSHRPDHAASGKLHEATAYGTVKCPDREGANLVYRKPLTGPKGLTRPEIGRIRDVRLRSMVEAHVAAVLAKGKNLKEALESFNTAHEGHPHVKEGLRRVRILKSEKPEYLVAVSHGERPHGKAYSAGENAFVDIFETPDSKWHGEATTVFQANEPCHRPSWHGLDATFVMRVRKGDLIALDHDGARQVMVVHRLDASNSRFKLAAHNETGNLDNRHAEPNDTDPFRWLMASYGTLKERCAERVRVDELGRVWRIPPKEASRSL

SEQ ID NO: 8831 - protein, 1069 aa, synthetic construct
  REGION 1002..1010: note = misc_feature - Xaa can be any naturally occurring amino acid
  REGION 1..1069: note = Synthetic
MVLRNVQSCSILPDLPRTSPDLQEVTGSIVVMNGFEKRRYRLGLDLGANSLGWATIWLDEGGPSGLGPAGVRIFPDGRDPQSKSSNAVSRRVARGARRRRDRYLQRRKELTDALIEAGLMPAGEAARKELQKCDPYAIRARGLDERLSLHELGRALFHINQRRGFKSNRKTDRQNEEGGVIAEAADKLDQMMLESGARTLGELLAHRHGERLGVRARNVSSGAKAAYDFYPTRAMLEQEFVKLWELQRKHHPELTAELRAKLQHIIFYQRPLVPPQVGKCALDPAKRPDDREGFRCPWAHPLAQRFRILQEVNNLTAGPVGERKRDLTADERFKALHKLLQTKSLSFDGLRKALKLESDLIFNLESDRRSKLDGDQTAARLRGNKAFGKRWHSFLPERQAEIVERLLEESDEEELVAWLIAETGVAEDCAYVIADVTLPDSHCRLGLRALKKIVPFMEQGQRYHEAASSAGYDHARLPTGEIRENLPYYGEILQDQVLGSGDARDPAERRWGRLPNPTVHIGLNQLRRVVNALIRRFGPPQEIVVELARSFKLSPDQLRKLELEQRENQRKNDDRRGQLEKLGLPVNYGNLLKLRLWEELNPKDPLDRQCPFTGRKIGLASLLSDAVEIEHLLPFSRSWDDSPANKTVCLRQANRAKGRKAPYEAFGSSPSYSGIGYDWQAIKLRAKALPPNKRWRFDPDAMQRFEAGGGFLARQLNETSWLARLSKQYLGAVTDPYKIWVVPGRLTALLRRKWGLDSLLDSGEGGRKNRNDHRHHALDALASGLTDRGLLQRMAREYDEERERIAVEPPWEGFRQDVARVLEAILVSHKPDHGAQGQLHEDTAYGRIAGAKEGEGNLVYRKPLAALRETEVERIRDAPLRDALQEAIGEGKAAGKPLLAILTAFAEEWGKKHGHSPLRHVRLTKTEKPDYLVQIGDGAAPYKAYSAGENLCVEIYQTADGTWRGEAISRYQANQKDHQPRWRAEEPGACLVMRLYKGDCLXXXXXXXXXNRFKLAPHREAGALDTRHKDSGDPFRWRMYSYNRLCQLKAEPVRIDEIGRPWRLKPGRS

SEQ ID NO: 8832 - protein, 1229 aa, synthetic construct
  REGION 1..1229: note = Synthetic
MAVTLGLDIGSNSVGSAWVDSDKKEIVLGVGVFPAGVDETENKRGSPKNQARRQKRSQRKNLARRAARKSRLRELLTSAGLLPADPIERKTLMETDPWVLRRKGLTQPLNPREFGRVLVHLNQRRGAWGVQTDPEDQEEGQVKEAIDHLKAAMREYDAKTFGQFIADLMDKRRHPVRVAKPRRPKCHFDDPPPSCPPNCEKQDQNCRFYPGAVRNRRDTFEFHATRDLIQKEFDLLWDKQKELGGELAGLLTDELRKELDDPNGNETWRQRGVIFGQRKTYWNLGTLGRCDLEPSDRCCPLADMHAQEFRVLETVNNIRIEERSKAPRALTPQERANLIAVLREQKTASVATVRKALNLNRKAVKEFFSLNIERDKDREINTDWFYREIVRVALGEDAWARMDGGKRESVNRAVLKFDPESPADTKRLRTGATDWWGLPPEAADRFIEAWKTRPRLEMRLNLSRRAILNLLPYMQEWGCSVTEAKQLFAEDGDNNATPEQRERYALGGSILTKAGRRFLRKHPDLLPPAPMLANPVVRKAIHEVRRHVMAYLHKFGRKPDRIVIELAKSARQTEEVRNKILSANRKREKERKEIIAEFGLAGQSLSQQRAAIERVTLCREQRGICPYSNLKPGAQGELISDDQAAKGEDVEIDHIIPLSRSQDNFLSNKVLCRRRANRGKGNRTPKEWLTAEQFALLEQRMAHWEKESPRKWENLHRDPLPEKEFLASQLAATAYAAEQVGTYLSDSLYGGEREGRRRVFFTKGTYTAMLRKDWQLFQTLRDANEDAAVDTTSGPQQPGDPGKKNRADHRHHAIDAVVVALTGPEIIQDVARLAAEREEYHERTGHWPKRNPLPPPWSEVEDFRRQVLSLLFDVFDKANTDGTRAEGAETGTPLVVSHRPAKRKAKGFLHKEDLWGAVDEEQGVFRIRCAVADLTPKMLQMPVDEDDSQVHQRLVRELKRGGLDQSQAKTVAGERLRHGHFTRCKMNPPLGKGGLVRDWDLRHAIRKCLEGNNMDPDNFTPKQMQDFARSGKLRMPSGVPIRTVVTIGPISDPVKIPVTDPYTGRQAVNLKTGRPLFRYHISRNNHHVEIMQDDKTGNWFPRDGRCVTMFEAAQRVRPSKNSNRVRAKSPDPVNRADEPGQTFVMSLSEGETVYATRPDRPERPDYSVVVKLDSNRIYFAPHWDAQSEKEQDRWSTTYPNLKSCGPAKDTPPYKVRVNPLGEVAPLHHD

SEQ ID NO: 8833 - protein, 1218 aa, synthetic construct
  REGION 1..1218: note = Synthetic
MISLGLDIGSNSVGSAWVDTDKQEVFLGVGIFPAGVDETDTKRGTPLGQKRRGKRLQRRSIARRAERKLALRKLLTQTGLLPSDPDQLQYLMNKNPWHLRRKALHEALTPHEFGRVLVHLNQRRGAVGIETNPEDPEEGKVKEAIDHLKGQLKDRTFGQFMADLMDERKKQVLNSAGQPKKDTFYHDPIRNRRDLFEFHADRPLIRQEFNAIWEKQKGFDTGLAMQLTDDLKKQIDNSGEDSTWRHKGIIFGQRRTYWDTGTLGRCDLEPTDRCCPIADMYAQEYRVLETVNNIRITKRGEAERCLTREERIQVIDTLRRQKTATTKTVRTSLGIGKKSVRDFYKLSLEADKDCEINTDWFYREIVHGVFTEDIWQKLTEDHRNSVNRAILKFDPANEEHAKRLREVAGKWWGLPQEAVDKIVAVWTTRPKLEKRLSFSRRAIINLLPYMRNGYEATRSRLMFAEDDANGATDKQRRRYAGIDNSLTKADRHFLKKHPGLLPPAPMLSNPVVRKAIHEVRRHIMAHLRKFGRKPDRVVIEFARSTKQSGKVRQSILDLNRRRESVRKRYDREYNLTNLTRNQQRAAEDRVMLCIQQNKSCAYTGRRITPDMAARGEGVEIDHIVPYSRSGDDSLNNKVLCFRETNRGKGNKTPREWLGNKFDEFITRFARFEKYKPDKDDCNEYFTAKDYARKYENLTREVRPDDEWKNSQLTDTAYAARQVASYLSDALYGGERDGKRRIYVTKGRYTAMLRRDWQLFQVLNPPCRKDDADGHAVEKTPGDQVNAEKDRGDHRHHAIDAAVIALTGPDIIPTLAAQAAEAEEYHERTGYWPKRIPIAPPWGTVSEFRRNVLSKVFDVFDKTDADGAPEKGSPLIVSHRPVKRKVTGYLHKEDLWGAVDEIKGIYRIRCKVSELSPKMLRMPIEETDSDVRKRLIEEGIIAGLSSKDARKKARERFEKGIFNRILVDPALGKGGLVRDWGLRKIIRDCLAANGIDPDNFTSKMIAEFANTGKLRMPSGVPIKSIITIGPISDPVKIAVRDRYTGKQALNTITGQPLYRFHISRNNHHSEILEDNNTGKWSDDCVTMFRAAQRVRPSKDSYSKPVEPKPAVNHSDRDGLRFIMSLSEGETIYMRHPGSDIVDYFVVFKLSPGRLYFIHHWDARPSALRKDVNGNTIPNSNREEISVTPADMKSLGPEPSIPPYKVRVGPLGEVTRLDYD

SEQ ID NO: 8834 - protein, 1277 aa, synthetic construct
  REGION 1..1277: note = Synthetic
LVTLKKQYTAFSCGGKEKILPGKNPSNLTHAGRRNQGKECVMGTTLGLDIGSNSVGSAWVDTDKKEIVMGVSVFPAGVDETDTKRGSPKNQRRREKRSQRRSLARRAARKRRLRELLTSANLLPADAVAWKALVEKNPWVLRRKALTESLTPHEFGRILIHLGQRRGAWGVQTDPEDPEEGKVKEAIDHLTAAMKESKAETFGQFIADRMDERRHPVPGKCNLAQPPAYCPPKCGSQNENCRFYCDAVRNRRDAFEFHATRDLIQKEFERLWETQKKLGGELAGLLTKELKEQLNNPKADDTWRQRGVLFGQRKTYWNLGTLGRCDLEPSDRCCPIADMHAQEFRVLETVNNIRISEYGREARALTDVERASVKKALQSQKTGSVPAVRKALGIDTASLKRKNLPHKFRLNLEADKDREINTDWFYREIVRAVFGEDAWLKMDEAKRESVNRAVLKFDPDSTAETERLRSGAIQWWGLAPEAADKFMQAWKTRPKLEKRLNLSRRAILNILPYMRQWGCGVIEARQLFAEDGENGASKEQRERYALGGSGLTKADRHFLRKHPNWLPPAPMLANPVVRKAIHEVRRHVIAYIRKFGRMPDRIVIELAREAKQTEKVRNKILAANRTREKERKQIILDFGLAGLPPHQQQAAVDRVILCRQQGSPAVCPYSDLVPGNTGKVITEGQAAKGTDVEIDHIVPLSRSQDNSLNNKVLCYRQANRGKRNLTPKEWLTAEQFSLLEQRMRHWEKDLRRKWENLHRAPLPEQEFLNSQLTATAYAAAQVGAYLSDSLYGGERDGRRRVFFTKGTYTAMLRKDWQLFQALKADGEGAAENGTADPQKRADPGNKNRGDHRHHAIDATVIALTGPEIIMDVARLAAEREEYHERTGHWPRREPLPPPWGTTDEFRRQALSQLFDVFDKANLDGTRSEGAETGTPLVVSHRPVKRKVIGYLHKEDIWGAVDEEEGVFRIRCPIADLNPKMLRMPEPETDDQVRQRLIRESEHAGMTNSAARKAATNRMRLGDFKRLLVDPSLGKGGLVRDWDLRRVIRECLKNNGIDPDHFTDKQMQEFAKTGSLRMPNDGVPIRAVITIGPISDPVKIAVRDPTTRRQAVNSRTGKLLFRYHISRNNHHVEIMQDAVTGGWSARNGKCVTMYEAAQRIRPPKDPDGGRPQSQQAVNREDAAGQTFVTSLSEGETVFARRWDPASNQAVGSSNYFVVVKLDSNRIFFAPHWDARSEREQDRWAVTYSDLKHCGPVKDAPPCKVRVDPLGQVRPLHHD

SEQ ID NO: 8835 - protein, 1229 aa, synthetic construct
  REGION 1..1229: note = Synthetic
MTISLGLDIGSNSVGSAWVDTNKKQIVMGVSVFPAGVEESDAKRGSPKNQRRREKRSQRRSVARRAARKRHLRELLTSAGLLPADEVTRQVLIEANPWTLRRKGLAEPLTPHEFGRILVHLNQRRGAWGVQTNPEDQDEGKVKEAIDHLTQAMEEAGAQTFGQFIADLMDKRRHPVPGKCNLEAPGDYCPPKCSSQNQKCRFYCDSVRNRRDVFEFHATRDLIRHEFRELWDRQKKLGGGLAALLTDDLRRQLDDPTGDRFWRQRGTIFGQRRTYWNLGTLGRCDLEPSDRCCPSADMHAQEFRVLETVNNIRISEYGGTQRGLTSQERASVRKALQCQKAGSVATVRRALGIDKAALRRKNLPDIYRLNLESDKDREINTDWFHREIIREVFGEDAWREMDDAKRESVNRAVLKFDPESSSEAEGLRSGATQWWGLSPEAAEKLIKAWKTRPRLEKRLNLSRRAILNLLPYMREFGCGVTEARQVFAEDGANCATPEQRRRYALGGSVLTKADRRFLRKHPGLLPPAPMLANPVVRIAIHQVRRHVLAYIRKFGRAPDRIVIELAREAKQTERVRNKILAANREREAQKKQIIAEFNLGAKPLNQQSAAVERVVLCRQQKCICPYTNLTPGAAGRQITEKQAAEGTDVETDHIVPLSRSQDNYLNNKVLCLRQANRGKGNHTPKEWLSAEQFSLLEQRMGHWKDELPRKWENLHRDPPPLEDFLTSQLTATAYAATQVGAYLSDALYGGEPDGRRRVFFTKGKYTAMLRKDWQLFQTLKEADEGQAAIAPSDPQERLDPGKKNRGDHRHHAVDAVVIALTGPDIIQEVARLAAAAEECHERTGYWPKRVPLPPPWGTPAEFRRQVLCQLFGVFDKANMDGTRAEGAETGEPLVVSHRPVKRKVKGYLHKEDLWGLVDEGEGVFRIRCPIADLNPKMLRLPELETDDQVRTRLARELQAVGFTEPEARKAATNRLRQADFKRQWAEPALGKGGLVRDWGLRRAIRKCLKDNGIDPDRFTNKQMQQFAKTGKLRMPDGGVPIRSVITIGPISDPVKIAVRDPITRKQAVNPRTKKPLFRYHISRNNHHVEIMQEAATGEWCARDGKCVTMFEAAQRVRPPKNKKGEHPKTPSAVNRDDGAGQTFVMSLSQGEMIHARRPHRPDGIGYFVVVKLDGNRIYFAPHWDARSEKEQDRWDVTYSDLKHCGPTKDNPPIKVRINPLGQVVPVYHD

SEQ ID NO: 8836 - protein, 1213 aa, synthetic construct
  REGION 1..1213: note = Synthetic
MTLSLGLDIGSNSVGSAWVDTDKKEIVMGVSVFPAGVDESETKRGSPKNQHRREKRSQRKNIARRAARKRRLREVLTAAKLLPADPIQLKNLVDLNPWALRRKALTQPLTPYEFGRVLLHLNQRRGAVGVQTDPDDPEEGKVKESIDRLNKTMTDRDAKTFGQFMADLMDERRHPIQGKEGKFYHDAIRNRRDVFEFHATRDLIKKEFDVLWNKQREFDGELAARLTGELRKQVDDPAADKTWRQRGIIFGQRKTYWNLGTLGRCDLEPSDRCCPLADMYAQEFRVLETVNNIRIGEYGGTQRGLTSQERASVRKALQCQKAGSVATVRRALGIDKAALRRKNLPDIYRLNLESDKDREINTDWFHREIIREVFGEDAWREMDDAKRESVNRAVLKFDPESSSEAEGLRSGATQWWGLSPEAAEKFIKAWKTRPRLEKRLNLSRRAILNLLPYMREFGCGVTEARQLFAEDGDNSATPEQRERYALGGSGLTKADRRFLRKHPGLLPPAPMLANPVVRKAIHEVRRHVMAYMRKFGRKPDRIVIELAKEAKQTEKVRNRILAANREREREKKQIITDFNLGAKPLSQQAAAVERVILCRQQKGMCPYTDLTPGAPGEIITDDQAAKGTDVEIDHIVPESRSQDNYLNNKVLCCRQANRGKGNRTPKQWLTAEQFSLLEQRMGHWEKGLPRKWENLHRDPPPLEDFLNSQLTATAYAASQVGAYLSDALYGGAREGRRRVYFTKGTYTAMLRKDWQLFQTLKEADEGWAADATSDPQRSGEPGKKSRGDHRHHAIDAVIVALTGPEIIAQVAHLAAEREEYHERTGYWPKRQPLPPPWGSTQEFRRHVLSQLFDVFDKANLDGTRAEGAETGTPLVVSHRPVKRKVSGYLHKDDLWGAVDEGEGVFRIRCPVADLNPKMLRMPVPEDDSQVIQRLIHEMQSTGSTESQAKKAAKDRMRLGNFKRQLTDPPLGKGGLVRDWDLRRVIRKCLKDNAIDPDGFTDKQMQEFAKTGKLRMPSGVPIRSVITIGPISDPVKIVVRDPITRKQAVNPRTKKPLFRYHISRNNHHVEIMQEAATGEWCPRDGKCVTMFEAAQRVRPPKNKKGEHPKTPSAVNRDDGTGTTFVMSLSEGEMIHARRPDRSPDQPDALGYFVAVKLDGKRIYFASHWDARSEKEQDRWDVTYSNLKHCGPAPDTPPYKVRVDPLGNVVPAPHD

SEQ ID NO: 8837 - protein, 995 aa, synthetic construct
  REGION 1..995: note = Synthetic
MITLGLDIGTNSVGWALIDEKNNEILRTGVRVFPEGVDRDTKGAEKSKNETRRLARGSRRNRARMKYRRDKLVRMLKRNGLLPASDIEFSELLREDPYKLRAKAIQEKISLHQIGRVLFHINQRRGFKSNRKSGDEKQGKVIKNANELQDEIDKSGLKTLGAYFASLDTSKKRIRDNYTLRSMYEHEFEEIWKFQSRFYPEILTDRLKTKVKDETIFYQRPLKPCDDLIKDCELEEDEKVCQRADWFARRFRILQDVNNLKIHNPEGTIKELSQDQRDTITQILLSKEKATFESIRKKLGLIDSQKFNTEEGSSNRKNPHLKGDVFQAKLKNINKKIFAGLDEEAKIDINNILIDQTIDDEEFISEICENYNYSRDEAIKISKIPLPNGYTNHSKKAILKLLPYMEKGFLTSDAVKEVYGRWPSEQKTEILDRLPLPPDFRNPIVNQGINEVRKVVNAVISAYGKPDKIAVEMARDVKGSKAERDEIRKKNWENEQKNEEARKILVEEFGFSRPAREDIIKYKLWIECRKTCPYTGKPVPQHLLFSPQSGVQIEHIIPYSRCLDDSYMNKTLCYADENRRKGEKTPYEYYSSKPEQYEEIRQRIAPLPFPKRSKFNQKEVKLDNFIERQINDTRYISRAVTSYLKQLGCTVIGTKGKITSDLRRAWGLNSILNTIGSTKNRDDHRHHAVDAAVTALTNQQHLRDLAYTKKRTEDLAMTEPWKGFRQELKESINSINVSHRVRRKVSGRLHEDTAYGPTGITNENGDEYYVYRKPLESLTLPMVHKVVDPTVREILLERLRENGIHTEGKTKSIPKKVWEEPVYMKSRKDARVPIKKVRIRTVYNNVAKIKDEEGKPYKAVTLGSNHHIEIFEFTDKKGNTKREGKVVSLFEAARRNKEGRPIVCRDYGDGKKFICSLAKNEMFMMKMDDGSFKLHRVQVVSLIVNQQVIILRPATFAGAGKSSDSPPIVQRKNANTLKGYKVTVDPLGNINPAND

SEQ ID NO: 8838 - protein, 990 aa, synthetic construct
  REGION 1..990: note = Synthetic
MSSYTLGLDIGSNSIGWALLDRDKKPSIIDMGVRVFPEGVDRDTKGLEKSKNATRREARGVRRIHQRRNLRKELLLSTLQTAGLLPKNESDLRSLFHTGPYQLRKKGLDDKLESYEFGRVLYHLSQRRGFKSNRKSGKAKEDSVVIKGANTLQAEIDNKKYRTIGEYFAGLNPKEKRIRGRYTFRSMYEKEFDLLWAKQLEFYPQVLTEDLRKKVRDVIIFFQRPLKPTDELIGDCELEPGEKRCPRGDWHARQFRILQDVNNLIIQNPDGMEQKLTADQRKILLDELGQKEKLPFDKIREKLGLIETQKFNAEYRVSKKGKRVESLKGDNFSWAMRSKNIFGPKVWDEMDEAEKIKLNEWLVEFEDDQLKEKLQSEYGFDDKKIEAVLKISLPQGYMSFSRKAIQKLIPYMKQGMLTPEALDAAYPDRNKKEGVEEKEKLDLPEDLRNPIVNKALFEVRKIVNTIVREYGKPARIKIEMARDVQGSRRQREELHWKQRENEERNEDARKRLKEDIGISNPTRDDVIKYNLWVECGKRCPYTGKQISQETSFGQNPEFQVEHILPYDRSLDDSYMNKTLCEVHENIHVKKNQTPYEAYSHDPEKYEQIKQNTKVLPWPKRQKFLQKEIDLDQHIARELNDTRYICKEVVKYLKKLGVYVSGTRGKITGELRHQWGLDGIFEELGTRRDDDHRRHAVDAVVVGVTENEHLRKLARSKYSVTGERFDPPWSVFREEVREKVKHINVSHRVQRKVSGKLHEETNYGATDKKGLYVFRKELKELTLPMVDKIVDTVVREIVKGRLTEKSIDLTGSGKPPKEVWNEPLYMKCKREDKKVPIKKVRVYNLAKSVIAMKDRSGHIYRYVEPGSNHHIEIFEYIDKKGKAKRDGKVVTMFEAVQRSQKGESVVQKEHGPGNKFICSLAINEMLMLDLEDGSKQPYRVEKISQNKQIFFQPHTYGGELKDHPPISKMPNQLKGYKVTVDPLGRIRWAND

SEQ ID NO: 8839 - protein, 988 aa, synthetic construct
  REGION 1..988: note = Synthetic
MAPYTLGLDIGSNSIGWALLSNNAGRGIINLGVRVFPEGVDRDTGGLEKSKNATRREARSARRTHQRRNLRKQQLLNVLEKAGLLPENESELRSLFHISPYQLRKKSLDEKLEPYEFGRVLYHIGQRRGFKSNRKTGKAKEDGIVTKEAGKLQADIDASNCRTIGEYFAGLNPEEQRIRGKYTFRSMYEKEYDLLWAKQAEFYPDVLTEQLRKKIRDEIIFFQRPLKPADDLIGKCGLEPDEKRCPRGDWYARQFRLLQDVNNLEIRNPNGIEAKLTDQQRRIVLGELAEKKEVTFDSLRKKLELMETQRFNLEQDGKVKNLKGDAFVAAMRSRNIFGPKCWDAMEEVEKIKLNEWLVELEDDQLSEKLRSKYGLSDEQIGHILKIALPRGYASFSRKAIMKLLPFMEAGAITSEAIEKAGYRPDEGDAGEALERLLQPPDLRNPIVQKALFEVRKVVNTIVREHGNPAKVKIEMARNVHGSMRQREELHWKIRENEKRNEDARKRLREDIRIANPTRDDVIKYKLWIECDKVCPYTGRSISQEALFGANPEFQVEHILPYDRSLDDSFMNKTLCEVHENIHVKRNQTPYEAYGHDAKRFEQILERVNKSQMPYHPKRKKFWQKEINLDEGIKRELNDTRYICRETVKYLKQLGVYVRGTRGKITAELRHQWGLDGIFTELGVRRDDDHRRHAVDAVVVAVTENEHLRRLARSKYSVTGVVFEQPWPDFRQEVKEKVKHINVSHRVQRKVSGKLHEETNYGATDKEGLYVFRKKLEDLTLPMVEKIVDPVVRRIVEGRLTERGIDLAGSGKPPKEVWKELLYMKTTRSNKQVPIKKVRVYNVAEKVIAMKDRSGRPYRYVEPGSNHHIEIFEFTDAKGRTKRDGLVITMFDAVQRSQKDEPVVKRDYGDGKKFICSLAINEMVMMEQDGGVNELYRVQKINQNTQIFFQPHIYGGDLKNHPPISKMPNQLRGYKVTVDPLGRIWPAND

SEQ ID NO: 8840 - protein, 989 aa, synthetic construct
  REGION 1..989: note = Synthetic
MAYTLGLDIGSNSIGWAILDKEKQRLIDSGVRVFPEGVDRDTKGLEKSKNATRREARGARRTHQRRNQRKQQLLKTLQTAGLLPQNEPELMSLLHNNPYELRKKVLDEKLEPYKFGRVLYHLSQRRGFKSNRKSSKAKEDSKIVKEAGELQKQIEQANCRTIGEFFAGLNPDEQRIRNRYTFRSMYEKEFDLLWAKQSEYYSQVLTENLRKKIRDEIIFFQRPLKPTDELIGDCELEPGEKRCPRADWFARKFRILQDVNNLRIQNSDGSESKLTAEQRNLVLDELGKKKELKFDDIRKKLNLMETQLFNLEQDGKVASIKGDVFAAAMRSKNVFGSKVWDAMDEQEKIKLNDAFVELEDDQLAEKLKTQYGLNENQIEIAMKVSLPQRYMSFSRKAILKLLPFMEQGCLTSEAIERAGYDRDKNTSGETANKLPLPPDLRNPIVQKALFEVRKLVNAVIREHGKPKNIAIEMARDVQGNRRQREELHWKMLENEQRNKEVRGKLIADMEIIRPSRDDVIKYKLWEECGRKCPYTGRSISQTALFGLNPEFQVEHILPYDRSLDDSYMNKTLCEVHENIHVKKGQTPYEAYSHNPEKYEQIKQNVRVLPWPKRQKFLQKEIDLDQHIARELNDTRYICRETISYLKQLGVYVRGTRGKTTAELRHQWGLDGIFDELNTRRDNDHRRHAVDAAVVAVTENEHLRRLAKSKYAVSGVAFEPPWPNFREEIRENVKQINVSHRVQRKVSGKLHEETAYGPTGKKDENGQDIFVYRKKLEDLTVPMVEKIVDPTVRKIVKDRLAEKGINTASVERKIAKEVWAEPLYMKTKKSDKKVLIKKVRIENVANNAIEMKDKFGRVYRVVEPGNNHHIEIFEYTDKKGETKRDSRVITMFDAVQRSRQGKPVVCKDYGDGRKFICSLVINDLVMMKNKTGEIDIYRVQKMDVNKMVRFRYHTASTIEKKETYIDKTAHLFEGYKVTVDLLGRVYPAND

SEQ ID NO: 8841 - protein, 1003 aa, synthetic construct
  REGION 1..1003: note = Synthetic
MGSYTLGLDIGSNSIGWALFQTHPKPSIIDIGVRVFPEGVDRDTKGLEKSKNATRREARGARRTHQRRNQRKEQLKSTLQTVLLLPSDDSVLRSLFQASPYQLRRKGLDEKLEPYEFGRVLYHLSQRRGFKSNRKSGKAKEDGVVIKGANTLQMEMDNKKCRTIGEYFAGLDPDEQRIRGKYTFRSMYEREFDFLWAKQAQFYPDILTDDLRGKVRDHIIFYQRPMRWDPDRIGGCELEPGEKRCPRGDWHARRFRLLQDVNNLILQDADGTERKLSSDQRKIILDELSQKEKLTFDKIREKLELMETQKFNAEYKISRSGKTVESMKGDVLVAAMRGKNVFGPKKWDALDEQEKMRLNEWLVELEDDQLREKLRSEYSLDNKQIEAVLRIPLPRGYMSFSRMAIVKLLEYMEQGAITSEAIAVAYRDRQASAQESESLNKLPLPHDLRNPIVNKALFEVRKVVNAIVREYGKPAKVKIEMARDVQGSSRQREEMHWKILENEKRNEDARKRLREDIGITRPTRDDVIKYKLWEECGHTCPYTGKHISQEALFGPNPEFQVEHILPYDRSLDDSFMNKTLCEVHENIHVKKNQTPYEAYSHDPERYEQVKQNIKALPWPKQKKFLQKEIDLDQHISRELNDTRYVCRQVTQYMKQLGAHVSGTRGKITNELRHQWGLDGIFDELGTRRDDDHRRHAVDAVVVAVTENHHLRKLAVSKYSVTGPSFEPPWVNFRDQVREKVKPLKVSHRVQRKVSGRLHEETAYGPTGRTDAKGQEYFVYRKALEDLTVTMVGKIVDPVVRDIVKERLRQQNIEPDAGNRKIPKEVWSEPLYMRQTKSDKKVRIKKVRIQDVRNPKNMVPLSGKDGNPYCAVDPGNNHHIEIFECIDTKGRTKQDAVVVTMLEAVRRSRMAEPVIQRNHGPDRRFLCSLAINEMFMLKLDDGTEVLHRVQKIDQNKRVILRPHTHGGKLSDSDSPPLIQRKSASTLVGYKVTVDPLGRIWPAND

SEQ ID NO: 8842 - protein, 986 aa, synthetic construct
  REGION 1..986: note = Synthetic
MGTYTLGFDIGSNSIGWALVETKKKPSIVGIGVRVFPEGVDRDTKGLEKSKNATRREARGARRTHQRRNLRKKQLLKTLQKVGFLPTSKSELRSVFHTNPYGLRKKGLDEKLERYEFGRVLYHISQRRGFKSNRKSGKAKEDGVVIKGANTLQTEMDTKECRTIGEYFASLNPEEQRIRGKYTFRLMYEKEIDLLWAKQSEFYPDVLTEELTKKIKDEIIFFQRPLKPQDELIGNCELEPGEKRCPRGDWYARRFRILQDVNNLLIQNPDGAERKLTEDERVILLKELSQKKEIEYDKVRKLLGLMETQKFNLEQDGKVKKLKGDGFAAAMRSKKLFGPAKWGEMAETEKVKLNEWLIELEDDELKEKLASEYKLNEGQIEAALKIELPRGYMSFSRKAITKILPFMEAGAITSEAIEKAGYRHDDRSTGEAVEKLPMPPDLRNPIVQKALFEVRKVVNAIVKEYGKPGKIKIEMARDVHGSRRQREELHWKILENEKRNEDVRKRLREDINIANPTRDDVIKYKLWEECGKMCPYTGKQISQTALFGPNPEFQVEHILPYDRSLDDSYMNKTLCEVHENIHVKKNQTPFDAYSHDPEKYEKIKQNIKVLPWPKRQKFLQKEIDLDQHISRELNDTRYICKEVVGYLKQLGVNVRGTRGKITGELRHQWGLDGIFTELGVRRDEDHRRHAVDAIIVAVTENEHLRKLARSKYSVTGEVFNQPWPDFREEVRENVKQINVSHRVQRKASGKLHEETNYGPTGKEGLYVFRKKLEDLTLAMVKDIVDDVVREIVKKRLEEKGVDFNGKGRKPPKEVWKEPLYMRTTKSNKKVLIKSVRVYNVAKHAIPLKDLSGQIYRYVEPGSNHHIEIFEYADEKGRVKRDSKVVTMFEAVQRNQKGEPVVKKDYGDGKKFVCSLSINDMVMMKNKAGEMDLCRVQKMDANKMVRFRHHTASTIEQKETYIDKTAHLFEGHKVTVDPLGRIYPAND

SEQ ID NO: 8843 - protein, 993 aa, synthetic construct
  REGION 1..993: note = Synthetic
MGSYTLGLDIGSNSIGWALLETHETPSIVDIGVRVFPEGVDRDTKGLEKSKNATRREARGARRTHQRRNQRKEQLKRTLQSVSLLPNGESALRTLFHTSPYQSRKKGLDEILEPYEFGRVLYHLSQRRGFKSNRKSGKAKEDGVVIKGANALQTEMANKQCRTIGEYFAGLNPEEQRIRGKYTFRSMYEQEFDLLWAKQKEIYPDVLTEDLRKQIRDEIIFFQRPLKPTDELIGECELELGHKRCPRGDWYARRFRLLQDVNNLKIQNPDGTQQELSGDQRKIILDELGQKEKLTFDKIREKLELLETQKFNAEYKVNKSGKTVESMKGDVFVTKMRGQSIFGSKKWDALDEQEKIRLNEWLVELEDDQLEEKLRSEYGLDNKQIETVLKIPLPPGYMSFSRKAIIKLLEFMEQGAITSEAIAVAYPDREATIQKNESLNQLPLPEDLRNPIVNKALFEVRKVVNAIIRKYGKAAKIKIEMARDVQGSRQQREELHWKQRENEERNKEARKRLREDIGITSPTRDDVIKYNLWDECGKVCPYTGKHISQQALFGPNPEFQVEHILPYDRSLDDSYMNKTLCEVHENIHVKKNQTPFEAYSHNPERYEQIKQNIKILPWPKRKKFLQKEIELDEHISRELNDTRYICKEVVRYMKKLGGHVTGTRGKMTAELRHQWGLDGIFDEIGSRRDDDHRRHAVDAIVVGVTENEHLRRLAKSKYSVTGESFEAPWVNFRNDVREQVKRINVSHRVCRKVSGKLHEETNYGPTGKKDDKGQDVFVYRKKLEDLTGPMVSEIVDKVVRQTVEDRLLEHNIDPQKVNKIPKEVWNVPLCMKTTSGGKSSVIKKVRIQAVFNNLILLRDTQGKPYRGVKPGDNHHIEILQYTDQKGKTKREGKAVSLFEAASRSRAHVPVVKKFHGANKEFVCSLCKGDMFMLELKPGDRILTRVQEIWESTNIVLRPHVNAVEAGDINKTASKIRGYKVTVDPLGRIWPAND

SEQ ID NO: 8844 - protein, 991 aa, synthetic construct
  REGION 1..991: note = Synthetic
MDSHTLGLDIGSNSIGWALLETEGKPSIVDMGVRVFPEGVDRDTKGLEKSKNATRREARGARTTHQRRSQRKEQLLKTLQGIGFLPTTDTELRTLFHTNPYGLRKKGLDEKLERYEFGRALYHINQRRGFKSNRKSGKANEDGVVIKGANSLQTEINAKGFRTIGEYFAGLNPEEQRIRGKYTFRTMYADEFDLLWAKQKEFYPDALTEELRKKIRDEIVFFQRPLKPQDEKIGNCELEPEEKRCPRGDWYARRFRLLQDVNNLKIQNPDGSEGVLNNEQHEALLDNLGRKEKLRFDEIRKQFGFIETQKFNAEYRIGLKGKKVESIKGDAFATTMGSKKVLGSKVWDAMNESQKIELNMAFVELEDDALAEKLKSQYGLNDKQVEQAMKISLPQGYMSFSRKAIMKLLPFMEAGAITSEAIEKSGYNHNKTTDGKTVEELPLPPDLRNPIVQKALFEVRKVINAIVHEYGKPGKIKIEMARDVQGSSKQREELHWKQHENKERNEEARKRLKEDIKINNPTRDDVIKYNLWEECGKRCPYTGKHISQEALFGSNPGFQVEHILPYDRSLDDSFMNKTLCEAHENIHVKKNQTPYEAYGHLPERYEEIKQNIKILPWPKRKKFLQENIDLDQHIDRELNDTRYICKEVVSYLKQLGVNVRGTRGKITNELRHQWGLDGVFDEIGTKRDDDHRRHAVDAVVVGVTENEHLRRLAKSKYAVKNEAFNSPWPDFREEVRENVKQINVSHRVQRKVSGALHKETNYGATGKEGLYVFRKNLEDLTLPMVEDIVDPVARKIVKKRLEEKSIDLNGKDRKLPKEIWKEPLYMKTTKSNKRVPIKKVRVYNVAKKMIPIKDRSGQPYRYVEPGSNHHIEIFEFTCPEKKGQRDSKIVTMFDAVQRSIGGQPVVQKNHGEDTRFVCSLAINDLVMMKNKRNETDLYRVQKMDANKMVRFRHHTASTLERKETYIDKTAHLFEGYKVTVDPLGRVWPAND

SEQ ID NO: 8845 - protein, 1072 aa, synthetic construct
  REGION 1..1072: note = Synthetic
LRARLQLEPPALKGLPHWAFCANAQWGRACGISRRKARVLVVTSPQARISYNIRILTPGLSRCQAQKSSSLSGEETMSGYTLGLDIGSKSIGWALIDTDGKPRVIDMGVRVFPEGVDRDTKGLEKSKNATRREARGARRTHQRRTQRKHRLVRVLRGAGLLPEGHAELKSLLAANPYPYRKKGLDERLELWQFGRVLYHLSQRRGFKSNRKGGDSKEDGVVKKQAGELQKKIDASGCRTIGEYLAGLNPDEQCIRGQYTFRSMYLREFDLLWAKQAEHHPDILTDEFSRKVRDEIIFFQRPLKPTDDLIGPCELEPDQKRCPRADWYARRFRLLQDVNNLIIQNPDGTEQKLSSDQRKALLIELRQREKLPFDKIRQKLALLETQKFNAEYRIGPSGKRVEAMKGDSFAAAMRGKSIFGADRWDVMGEQQKIRLNRMFIELEDDDLARSLATEYGLNDAQVQSAMKVSLPQGYMSFSQEAIEKLLPFMESGALTHEAIEQAGYHAREADGAEAVTHLPLPPELRNPIVQRALFEVRKVVNALVHTYDKPPRIKVEMARDVQGSRRQREEVHWRMLENEKRNEEVRKRLREDIGISNPTRDDLIKYKLWEECGRTCPYTGRQISQEALFGPNPECQIEHILPYDRSLDDSFMNLTLCEVHENIHVKRNQTPFEAYHEDAEKYEQIKQNTKVLPWAKRQRFLQEQINLDTQIARELNDTRYICRETVAYLKQLGIHVRGTRGKVTAELRHQWGLDSIFTELGVRRDEDHRRHAVDALVVAVTDTEHLRGLAASKYAVVGARFETPWATFRDEAREKVKQINVSHRVCRKVSGALHEETNYGATGLKDENGQDFYVYRKRLEDLTTAMVDKIVDPVVRDIVRQRLLQKGIDPAAANRKVPKEVWKERLYMRRTKSSRQVEIKSVRIWDVKTNAISFRDDAGHAYRAVDSGNNHHIEIFEYVDDKGKTRRDGRVVTLFEAVQRSLRGDPVVQKGSSDGRRFVCSAAINEMFLLQFDDGHEELFRVQKISSNQQIFLRQHTFGGDIQKCKAISKYPNTLKGRKVSVDPIGRIWPAND

SEQ ID NO: 8846 - protein, 994 aa, synthetic construct
  REGION 1..994: note = Synthetic
MAHTLGLDIGSNSIGWAILDKEKQRLIDMGVRVFPEGVDKDKGLEKSKNATRREARGARRTRQRRNQRKQDLVKTLQTAGLLPQTESEIITLFQKKPNPYEIRKKGLDSKLELYEFGRVLYHLSQRRGFKSNRKSGESKDDGKVKKEAGELQKKIDAANCRTIGEYFAGLNPDEQRIRGRYTFRSMYEKEFGLLWAKQSEFYPQILTENLLKKICDEIIFFQRPMKPADELIGNCELEPGEKRCPKSDWFARRFRMLQDVNNLKIQNPDGTENKLNDEQRQELLKELSQKKELPFDKLREKLGLLDSQKFNLEQRGKIKNLKGDGFATAMRSKNVFGAKAWDAMNEQEKIILNNAFIELEDDELIKFLIAEYNLSQEQIETAMKAPLPQKYMSFSRKAILKLLLFMEQGCLTSEAIEKAGYRRDEGGSLAMIDKLPLPPDLRNPIVQKAMFEVRKLVNAVIGRYGKPKSIVIEMARDVHGSLSQREELHWQILENEKRNEDVKAKLRNDIDIVKPSRDDVIKYKLWEECGRKCPYTGKSISQNALFGQNPEFQIEHILPYDRSLDDSYMNKTLCDVHENIQIKQSQTPYEAYNHQPEKYEQILQRVTGSDMPYPKKKKFWQKELDLDKHIERELNDTRYICKETINYLKQLGVYVRGTRGKITSELRHQWGLDGIFDELGVWRNDDHRRHAVDAAVVAVTENEHLRRLAKSKYAVSGVVFEPPWPNFREETRENVKQINVSHRVRRKVSGQLHEETAYGPTGKKDENDQFVFVYRKKLEDLTLPMIEKIVDPVVRQIVKDRLEEQRKKNDKAVVGNKIFKNVWAEPLYMKNTKSDKKVPIKKVRIENIASNVIEMKDKFGKVYRAVEPGKNHHIEIFEYTDKKGETNRDSRVITMFDAVQRSRQGKPVVCKDYGDGRKFICSLVINDLVMMKNKTGEMDIYRVQKMDINKMVRFRHHTASTIDKKETYIDKTAHLFEGRKITVDLLGRICPAND

SEQ ID NO: 8847 - protein, 993 aa, synthetic construct
  REGION 1..993: note = Synthetic
MNSCTLGLDIGSNSIGWALLETEGKPSIVDMGVRVFPEGVDKDTKGLEKSKNATRRESRGARRSHQRRNLRKEQLLRTLQIAGLLPKGESAITSLFQKNAYELRKKGLDKKLELFEFGRILYHINQRRGFKSNRKSGDSKENGTVKKEAGELQRKIEAAGRRTIGEYFAGINPEEQRIRKRYTFRSMYENEFDLLWAKQLEFYPQVLTGELRKKIRDEIIFFQRPLKPTDKLIGECELEPGEKRCPRGDWHSRRFRLLQDVNNLKIQNPDGSDDKLSDEQCKALLDELGCEEKLSFDEIRQKFGLIETQKFNAEYRIGTKGKRVESIKGDVFAAKMGSKKVFGAKAWDGMNEQQKMELNAAFVELEDDALAEKLKSQYGLNDKQIEQAMKVSLPQGYMSFSRKAIMKLLPFMEQGAITSEAKEKAGYNQNRVTDGKTVDKLSLPPDLRNPIVQKALFEVRKVVNAIVHEYGKPGKIKIEMAREGQGSSKQREELHWKQVENKERNEEVRNRLMQDMNILNPRRDDVIKYKLWEECGKVCPYTGKHISQEALFGKNPEFQIEHILPYDRSLDDSYMNKTLCEVHENIHIKKSQTPYEAYGHETQKYEEILTRVNKSQMPYPKKRKFLQKEIDLDKHIERELNDTRYICKEVVSYLKQLGVNVRGTRGKITSELRHQWGLDGVFDEIGTKRDDDHRRHAVDAVVVGVTENEHLRRLAKSKYAVKDETFDPPWPDFREEVRENVKQINVSHRVRRKVSGALHKETNYGATDKEDLYVFRKNLEDLTLPMVKDIVDPVVREIVKNRLEKKGVDLNGKDRKPPKEVWKESLYMRTTKSKKQVPIRKVRVYSVAKKVIPMKDRSGQPYRYVEPGSNHHIEIFEFTNPEKKEQRDSKVVTMFDAVQRSVGGQPVVQKNHGEDTRFICSLAINDLVMMKNKRGEMDLYRVQKMDANKMVRFRHHTASTIERKETYIDKTAHLFEGHKVTVDPLGRVWPAND

SEQ ID NO: 8848 - protein, 997 aa, synthetic construct
  REGION 1..997: note = Synthetic
MGNYTLGLDIGSNSIGWALVEDAVEAPRIVDMGVRVFPEGVDRDTKGLEKSKNATRREARGARRTHQRRRQRKQRLVRALRQVGLLPCDKAEVRSLFQTDPYEIRKRGLDHRLELYEIGRAFYHLSQRRGFKSNRKSGALKEDGTVKKEAGELQRKIDEAGCRTIGEYFAGLDPEQQRIRGRYTFRSMYQKEFDLLWAKQVEFYPKVLTEDLRSKVRDEIIFFQRPLKSAKDLIGDCELEPTEKRCPRADWYARRFRLLQDINNLIIQNPDGTEQKLSPDQRAALLGELGQREKLTFDNIRAKLGLLETQKFNAEYRIGRKGKKVEAIKGDVFVWTMRGKSVFGPKAWDAMADERKVSLNELFVELEDDDLARKLETEYGLTDKQVQAAMKASLPQGYMSFSRKAVLKLLPFMEAGALTHEAIDQAGYRKEEPTQTDAIARVSFPPDLRNPIVQKALFEVRKVVNALVREYGKPTRIKIEMARDVQGSKRQREELHWRNEDNRKKNEEVRDRLRTDIHIDDPSRDDVIKYKLWQESGKMCPYTGRQICQEALFGPNPEFQVEHILPYDRSLDDSYMNLTLCEVHENIHGKRNQTPFEAYGSGAERYEQIKQRIKVLPWPKRQKFLQQEINLDSHISRELNDTRYICRETVAYLKQLGVHVRGTRGKITAELRHQWGLDGIFSELGVRRDDDHRRHAVDALVVAVTDNEHLRRLAVSKYVLAGPRFETPWSAFRDEARGNVKRMNVSHRVCRKVSGALHEETNYGPTGVRDQAGQDIYAYRKKLEDLTTPMVEKIVDPVVRDIVRQRLLMKGIDPAAADRKIPKDVWKEPLYMRRTKSDKMIQIRRVRIHDVKNSIIVLTDESGRPYRAVEPGGNHHVEVFEYVHGTKTGTREAEVVTMFEAVRRSRARAPVVRRDHGPGTRFVCSLAINDMVMMPDKSGKMDLFRIQKMSASKQVYFRHHTAARIDSERTLIRKQAHLFNGYKVSVDPTGAICRAND

SEQ ID NO: 8849 - protein, 998 aa, synthetic construct
  REGION 1..998: note = Synthetic
MSYTLGLDIGSNSIGWALIGNTDKPSLIATGVRVFPEGVDRDTKGAELSKNQARRLARGARRNRSRKAYRKDKLVRALKARDFLPQSTEQMERLFLLDPYSLRARGLDAKLDRYEFGRVLYHLNQRRGFWSNRKSGKAKDDGVVKKQASELQAKIDESGCRTLGEYFSKVRSDSVMIRGQNTFRSMYEHEFDLLWQKQSEYYPELNDEEYYKKIRHQTIFYQRPLKPMDNRIGKCELEPTEQRCPRGDFYARRFRMLLEVNNLKIYNPDGSQSDLSQEQRRTVFAMLSEKKEVSFDEIRKKLGLMATQTFNLEEGKVDKKNAKMKGDEFAASLRSAVGKKDYARLTDADVALLNEYVLDDSLSDEQVETAIAEKFGFTAEQTRKIIDISLPERYASFSRLAIQKLLPHLEQGMLLHQAIEAVYGRPQARQDGPVVDQLGFPADVRNPLVNKALWEVRKVVNAIIREYGKPDKIAIEMARDVKGSLEERRELQQQIRANEQENEKARQELLKMGISKPSRDDIIKYKLWQECGQVCPYTGRAISQAALFGPTPEFQIEHILPYSRSLDDSYMNKTLCYVNENRLKGNETPYEYYHGKEQYDQIKQRIRVLPYPKRQRFLQKEVDLDTFVERQLNDTRYITREVVKYLKTLGVYVFGTKGQSTAELRHQWGLNSILDLTGAGLKNRDDHRHHAIDAIVVALTNKDHLTKLARSKYDPVSDVFEEPWEGFRNEVEQKVNAILVSHRCTRKVSGALHEETNYGPTGLTDDKGQAIYVYRKKLQDLTGSMVEKIVDPVVRAIVRQRLLAFGIDPQTQSGKVGKEVWQEPLFMRSKNGKGPQIKSVRIRDVFNNMIGLKDKQGKLYRAVKPGGNHHIELFEYKDDKGNTKRDARVVTMFEAIQRVKNNRPVVCRDYGDGKKFLCSLAKNELVMLQREDNSEVLHRIQYISELPTGPRIVLRPHTYAGKLSDSDMPPLIQRKTPNTLVGYKVQIDPLGRITRAND

SEQ ID NO: 8850 - protein, 989 aa, synthetic construct
  REGION 1..989: note = Synthetic
MGSCTLGLDIGSNSIGWALIETKKKPSIVGIGVRVFPEGVDRDTKGLEKSKNATRREARGARRTHQRRNLRKEQLLKTLQKIKFLPTSESELRSVFHTNPYGLRKKGLDEKLEPYEFGRVLYHISQRRGFKSNRKSGKAKEDGVVIKGATALQTEMDTKGCRTIGEYFASLNPEEQRIRKWYTFRSMYENEFDLLWAKQSEFYPDILTEELRKNIRDEIIFFQRPLKPQNEKIGNCELEPSEKRCPRGDWHARRFRLLQDVNNLIIQNPDGTEQKLSNDQQKRKVLLDELSQNEKLSFDKIRKKLGLIETQKFNAEYRVSKSGKTVESLKGDNFSWAMRKKNIFGPNVWDAMNEQEKIKLNEWLVELEDDQLREKLRIEYSFNDKQIEATLKISLPQGYMSFSRKAIIKLLEFMEQGALTSEAIAVAYRDRKRTSEENNLDKLPIPEDLRNPIVNKALFEVRKVVNAIVKEYGKPGKIKIEMAREVQGSSKQRKELHWKQIENKERNEKVRQRLIQDMNIPNPSRNDIIKYKLWEECGKICPYTGKSISQEALLGPEFQIEHILPYDRSLDDSYLNKTLCEVHENKDVKRNQTPYEAYNHDTEKYEQILERVNKSQMPYPKKRKFWQKEIGLEQALRQLNDTRYICRETVKYLKQLGIYVEGTRGKITSELRHQWGLDGIFDELGTKRDDDHRRHAVDAIVVGVTEDDHLRKLARSKYAISGPSFELPWPDFREEVRENVKKINVSHRVQRKVSGALHKETNYGATKKEDLYVFRKNLEDLTLPMAEDIVDPVVREIVKKRLEEKGIDLDGKDRKPPKEVWKEPLYMKTTKSNKKVPIKSVRVYNIAENVIAMKDRSGQPYRYVEPGSNHHIEIFEYTDKKGKVKRDGKVITMFEAVQRNRRGEPVVKKDYGDGKKFVYSLAINEIFMLEQDGELYRVQKISSNQQIFFRHHTFGGELQKHKGISKYHNTLNGQKKTIDPLGRIWPAND

SEQ ID NO: 8851 - protein, 989 aa, synthetic construct
  REGION 1..989: note = Synthetic
MGSHTLGLDIGSNSIGWALLETKGKPSIVDMGVRVFPEGVDRDTKGLEKSKNATRREARGARTTHQRRSQRKKQLLKTLQAIGFLPTADIELRSLFHTTNPYGLRKKGLDEKLEQYEFGRALYHINQRRGFKSNRKSGKAREDGVVIKGATALQKEMDAKGCRTIGEYFAGLNPEEQRIRKQYTFRSMYADEFDRFWAKQKEFYPDTLTEDLRKKIREDIIFFQRPLKPQDEKIGNCELEPGEKRCPRGDWYARRFRLLQDVNNLMIQNPDGSENKLTSEQRKALLDELGQKKELSYDKIRELLGLLETQRFNLEQDGKVKNLKGDGFMAAMRSKKLFGPKVWGEMAEGEKVKLNEWLVELEDDELKEKLTSEYKLNEEQIEASLKIELPQRYMSFSRKAIMKLLTFMEQGYLTSESIEKAGYRRDDSDTGQAVDALPLPQDLRNPIVQKALFEVRKVVNAIIREYGKPGKIKIEMARDVHGSSRQREELHWKILDNEKRNKEVRERLIEDMKIVKPTRDDVIKYKLWEECGRTCPYTGKHISQTALFGENPEFQIEHILPYDRSLDDSYMNKALCEVHENIHVKKGQTPYEAYNHNTEKYEQILERVNKSQMPYPKKRKFWQKEIDLDQHIARELNDTRYICREVVKYFKQLGVNVRGTRGKITSELRHQWGLDGVFDEIGTKRDDDHRRHAVDAVVVGVTENEHLRRLAKSKYAVTGKTFDLPWPDFREEVRENVKQINVSYRIQRKVSGALHKETNYGATNKDGLYVFRKNLEDLTLPMVDDIVDPVVRNIVKKRLEEKGIDLNGKDRNPPKEIWKETLYMKTTKSNKRVPIKKVRVYNAAENMIPMMDEQGQPYRYVEPGSNHHIEIFEYTDKNSKVKRDGKVVTMFEAVQRNRRGEPVVKKDYGDVKKFICSLAINEMFMLELDDGSKELYRVQKISSNQQIFFRHHTFGGNLQKHKGISRYPNTLNGQKKTIDPLGKIFLAND

SEQ ID NO: 8852 - protein, 990 aa, synthetic construct
  REGION 1..990: note = Synthetic
MDSYTLGLDIGSNSIGWALLDVGERPTIVGMGVRVFPEGVNKEKGQEKSKNATRREARGARRTHQRRNLRRDQLVKTLKKAGLLPEGNKELAELLSNKDPYELRKKGLDEKLDLYDFGRALFHINQRRGFKSNRKSDKKKEDGPIAKGAGELQKRINDAKCRTLGEYFAGLNPEEQRIREKYTFRSMYEEEFDLLWAKQSKFYPKVLTEELQEKVRDKIIFFQRPMRWDPKTIGDCVLELGEKRCPRGDWYAKRFRILQDVNNLKICNPDGTVDSLTEEQRQILLDELSKKKEVKFTSLRKRLGLLESQKFNAEYEVDEKGKKNEKLKGDVFCASMRSKKIFGSKVWDGMDEEEKIKLNEWLVEFEDDQIGEKLRSEYNFNDKQIESVLKISLPQGYMSFSRKAIQKLLPLMEEGKRTDEALDKVYPERNEYDEVEETNKLQLPKDLRNPLVNRAMFEVRKVVNAIVREYGKPAKIKIEMARDVRGTTRERRKSHFKMLDNERRNEQTRKRLIEDMKIVSPTRDDIIKYNLWIECGKICPYTGKSISQAALFGPNPEFQVEHILPYDRTLDDSFMNKTLCEVHENKDVKRNQTPFEAYGHDEEKFEQLKQRVNRTKMPYWKKQKFWQKEIDTDNIISRELNDTRYINREVVKYLKQICSNTSGTKGKITSELGYQWGFIKDRNDHRHHAIDAAVIAVTQPEHLRQLGKSKYSKGTISFQPPWPHFREELSERVKHINVSHKPSRKVSGALHEETNYGLTGLKDKKGQDIFVYRKKLEDLTNQMIIKIVDPVVREIVIGRLAEYGIDLAKDKKIPPKDVWSKPLYMKNTRSDKKVPIKKVRIRKVLSNAEGIRNQEGKVYRYVNPGRNHHVEIWEYTEGKKEGKRDAEVVSMFEAVRRSQSGKPVVQRNHGPGTRFVCSLAINDMVMMKNKTGEMDLYRVQKMDANKMVRFRHHTASTIDRKETYIDKTAHLFEGHKVTVDPLGRVWRAND

SEQ ID NO: 8853 - protein, 991 aa, synthetic construct
  REGION 1..991: note = Synthetic
MSSYTLGLDIGSNSIGWALVDLGEKPSIVDMGVRVFPEGVDRDTKGLEKSKNATRREARGARRTHQRRNLRKGQLLSTLQVSGFLPKDDSELRSLFHTNPYQLRKKGLDEKLEPYEFGRVLYHLSQRRGFKSNRKSGKGKEDGVIIKGANALQTEMDSKGCHTIGEYFAGLNADEQRIRGRYTFRSMYEQEFSLLWTKQGEYYPDVLTVGLQKKIRDEIIFFQRPLKWDPETIGDCELEPGEKRCPRGDWYARRFRLLQDVNNLIVQNPDGSEDKLSGDQRKILLDELGQKEKLPFDKIRQKLGLMETQKFNAEYKIGRSGKTVESLKGDNFSWSMRSKNIFGPKKWDAIDEQEKMKLNKWLVEFEEDQLREKLRSEYGFNDEQIKALLKIVLPQGYMSFSRKAIIKLLEFMDQGAITSEAIAVAYRGGQTTGGKEDNLDELPMPEDLRNPIVNKALFEVRKVINAIIREYGKPKKIKIEMARDVQGSRRQREELHWKQEENKRRNEDARKRVIEDIGIRNPTREDIIKYNLWQECDKRCPYTGRQISQEGLFGANPEFQIEHILPYDRSLDDSFINKTLCEVHENIHVKKNQTPFEAYSHDPERYEQIKQNIKVLPWPKRQKFLEQEINLDTHINRELNDTRYICREVVGYLKQLGVNVRGTKGKITAELRHQWGLDGIFEELRTMRDDDHRRHAVDAVVVGVTENEHLRRLARSKYSVTGVSFEAPWDGFREQVREKVKHINVSHRACRKVSGKLHEETNYGPTKEKDRYVFRKKLEDLTLAMLKDIVDDVVREIVRKRLEEKGVDLAGKDKKPPREVWKDLYMKTTKSEKKVRIKKVRVYNVAKNVKGMKDRSGQVYRYVEPGSNHHIEIFEYTDAKGKVKRDGEVITMFDAVQKSQTREPVVNRYFGQSKKFIFSLAMNEMFMMDTKSGSKELYRVQKISGNKQIFFRHHTFAGELQKHKGISKCPNSLQGYKVTIDPIGRVWPAND

SEQ ID NO: 8854 - protein, 989 aa, synthetic construct
  REGION 1..989: note = Synthetic
MASYTLGLDIGSNSVGWALLDLGEKPRIVDMGVRVFPEGVDRDTKGLEKSKNATRREARGARRTHQRRNLRKGQLLSTLQVSGFLPKDDSELRSLFHTNPYQLRKKGLDEKLEPYEFGRVLYHLSQRRGFKSNRKSGKAKEDGVIMKGASALQTEMDSKGCRTIGEYFAGLNADEQRIRGPYTFRSMYEKEFSLLWTKQGEYYPDVLTVELQKEIRDEIIFFQRPVRWDPETIGNCELEPGEKRCPRGDWYARQFRILQDVNNLIIQNPDGTEQKLTADQRKILLDELGQKEKLTFDKIRQKLGLMETQKFNAEYKIGRSGKTVESLKGDNFSWSMRSKNIFGPKKWHGTDEQEKMKLNEWLVELEDDQLKERLRSEYGFDDKQIEAILKISLPRGYMSFSRKAIINLLEFMEQGALESQARTVAYPDRRTTDDENTLDKLPMPEDLRNPIVNKALFEVRKVVNAIVREYGKPARINIEMARDVQGNTRQRDELHWKQHENKERNEDARKRLKEDIGINNPTRPDVIKYNLWVECGKRCPYTGRQISQTALFGPNPEFQVEHILPYDRSLDDTYMNKTLCHVDENRVKHNKTPYEAYSHDPERCEQIKQNIKVLPWPKRQKFLEQEINLDTHINRELNDTRYICREVVGYLKQLGVNVRGTKGKITGELRHQWGLDGIFEELRTMRDDDHRRHAVDAVVVGVTENEHLRRLARSKYSVTGVSFEPPWDNFREDVREKVKHINVSHRACRRVSGKLHEETNYGPTKEKDRYVFRKKLEDLTLAMVKDIVDDVVREIVKKRLEEKGVDLAGKDKKPPREVWKDLYMKTTKSEKKVRIKKVRVYNVAKNVIAMKDLSGQVYRYVEPGSNHHIEIFEYTDAKGKVKRDGEVITMFDAVQKSQTREPVVNRYFGHNKKFIFSLAINEMFMMHTKSGSKELYRVQKISGNKQIFFRHHTFAGELHKHKGISKYPNSLNGYKVTVDPLGRVWPAND

SEQ ID NO: 8855 - protein, 1001 aa, synthetic construct
  REGION 1..1001: note = Synthetic
MDSYTLGLDIGSNSIGWALLKAGEQPEIVGMGVRVFPEGVDRDTKGLEKSKNTTRREARGARRTHQRRNLRKRQLLGALRFKGLLPSDDSQLISLFHTNPYELRKKGLDEKLEPYEFGRVLYHLSQRRGFKSNRKSGKAKEDGVVIKGANALQTEMDAKGCRTMGEYFAGLNPEEQRIRGKYTFRSMYEKEFDLLWEKQKGFYLNVLTDELCKKIRDEIIFFQRPLKPTDELIGECELEPGEKRCPRGDWYARQFRILQDVNNLIIQNPDGTEQKLTADQRKILLDELGQKEKLTFDKIRQKLGLMETQKFNAEYKIGRSGKTVESLKGDNFSWSMRSKNIFGPKKWDAIDEQEKMKLNEWLVELEDDQLKEKLRNEYGFDDKQIEAVLKISLPQGYMSFSRKAIIKLLEFMEQGALTSEAIDVVYHDRKAIGEESENLDTLPLPEDLRNPIVNKALFEVRKVVNAIVREYGKPAKVKIEMARDVQGNKRQRDELHWKQHENKERNEDARKRLKEDIGINNLTRDDVIKYKLWEECGKMCPYTGKHISQTALFGPNPEFQVEHILPYDRSLDDSYMNKTLCEVHENKDVKKNQTPYEAYSHEPEKYEQILERVNKSQMPYPKRKKFWQKEIDLDQHIARELNDTRYICKEVRGYLEQLGVNVRGTRGKITGELRHQWGLDGIFTELGVWRDDDHRRHAVDAVVVGVTENEHLRRLARSKYSVTGVFFEPPWSDFREEVREKVKHINVSHRVCRKVSGALHEETNYGPTGLKDEKGQDLFVYRKKLTDLTIPMVEKIVDRVVREVVKNRLTEKGVDLSKGEKIPKEVWNEPLYMKCKNNDKKVPIKKVRIRDVFNNMITLNDKSGQSYRSVAPGSNHHIEIFEYKDKKGNTKLDGDVVTMFEAVRRSQTGERVVKIDHGQGKKFVCSLAINEMFMLEVEGKEVLHRVQKIIHDGRIVLRPHTYGGKLSDSDSPPAIQRKSPNTLKGYKVTVDPLGRVWRAND

SEQ ID NO: 8856 - protein, 1000 aa, synthetic construct
  REGION 1..1000: note = Synthetic
MASYTLGLDIGSNSIGWALLDLGEKPRIVDMGVRVFPEGVDRDTKGLEKSKNATRREARGARRTHQRRNLRKGQLLSTLQVSGFLPKDDSELRSLFHTNPYQLRKKGLDEKLEPYEFGRVLYHLSQRRGFKSNRKSGKGKEDGVIIKGANALQTEMDSKGCHTIGEYFAGLNADEQRIRGRYTFRSMYEQEFSLLWTKQTEYYPDVLTVELQKKIRDEIIFFQRPLKWDPETIGHCELEPGEKRCPRGDWYARRFRLLQDVNNLIVQNPDGSEDKLSGDQRKILLDELAQKEKLTFDKIRQKLGLMETQKFNAEYKIGRSGKTVESLKGDNFSWSMRSKNIFGPKKWDAIDEQEKMKLNKWLVEFEEDQLREKLRSEYGFNDEQIKALLKIVLPQGYMSFSRKAIIKLLEFMDQGAITSEAIAVAYRGGQTTGGKEDNLDELPMPEDLRNPIVNKALFEVRKVVNAIIREYGKPAKVKIEMARDVQGNKRQRDELHWKQHENKERNEDARKRLKEDIGINNPTRPDVIKYNLWVECGKRCPYTGRQISQTPLFGPNPEFQVEHILPYDRSLDDSYMNKTLCHVDENRVKHDKTPYEAYSHDPERYEQIKQNIKVLPWPKRQKFLQQKINLDTHINRELNDTRYICREVIAYLKKLGVNVRGTRGKITGELRHQWGLDGIFDELATKRDDDHRRHAVDATVVGVTENEHLRKLARSKYSVSGVRFDSPWPDFREEIREKVKHINVSHRACRRVSGKLHEETNYGPTGKNDENGQDIYVYRKPLDALTLPMVDKIVDPVVRGIVKTRLVEKGISLDSSDRKIPKEVWKEPLYMRARKSDKKVPINSVRIHDVKTNMKPLKDKTGKVYRFVEPGSNHHIEIFEYRDEKGNIKRDGKVVTMLDAVQRSQRGEPVIQKAHGPHKKFICSLAINEMFVLELEDQIKILHRVQKIDKNNRIILRPHTYSRKVSDSDNPPLIQRKSASTLRGYKVTVDPIGRIWPAND

SEQ ID NO: 8857 - protein, 988 aa, synthetic construct
  REGION 1..988: note = Synthetic
MALTLGLDIGSNSIGWALIDNEKHKLTDIGVRVFPEGVDRDTKGLEKSKNATRREARSARRTRQRRNSRKLKLIKELQTVGLLPKQETELNKLFLTNHNPYKLRKKGLDEKLEPFELGRILYHLSQRRGFKSSRKNGETKDDGKVKKEANELQKLMDSANCRTLGEYFAILDPDEQRIRGRYTFRSMHEKEFDLLWSKQTDYHNILTPELQKKLRDEIIFYQRPLKPSDDLIGNCELETSEKRCAKGDWFARKFRILQDVNNLKIQNPDGSENKPTEEQRNYILDELSKKKELKFDDIRKKLNLLETQVFNLEQDGKVASLKGDAFVAAMKRKNVFGHKTWDTMPEQEKIKINEAFIDLEDDDLVKFFKNKYKFNDEQIETALKAPLPQKYMSFSQKAILKLLPFMEQGYLTSEAIEKAGYNRNHENDIMTDVLPLPPDLRNPIVQKALFEVRKLINAVIRQYGKPKTIALEMARDVQGSSKQREEMHWKMLENEKRNKKVREKLINDMNITKPSRDDIIKYKLWEECGRKCPYTGKSISQNALFGEHPEFQIEHILPYDRSLDDSYMNKTLCDAHENIHIKKGQTPYEAYHNDTEKYEQIKQNIKILPYPKRQKFLQKEINLDEHIKRELNDTRYICRETINYLKQLGIYVRGTRGKTTAELRHQWGLDGIFDEIGSKRGDDHRRHAVDAAIVALTDNEHLRQLATSKYAVAGIYFDPPYPDFRKEIKENVQQINVSHRVQRKVSGKLHEETAYGPTNRKDEKGQNVFVYRKRLEDLTIPMVGKIVDHDVRDIVLNRLKEKGIDTNNGDRSISKEVWKETVYMKNTKSDKKVPIKKVRIEDVGNNLIPISDKNKKIYRYVAPGNNHHIEIFEYIDGKRRKKRDGKVITMFDAVQRSRNGEPVVCRDYKDGKKFICSLAINEMYLIETEDKSELYRVQKISSNKQIFLRHHTFGGDLSKSKGISKVPETLKGRKVTIDFLGRLYPAND

SEQ ID NO: 8858 - protein, 994 aa, synthetic construct
  REGION 1..994: note = Synthetic
MGSYTLGLDIGSNSIGWALLKTGKQPGIVGMGVRVFPEGVDRDTKGLEKSKNATRREARGARRTHQRRNLRKRQLLGALRFKGLLPSDDSQLISLFHTNPYELRKKGLDEKLEPYEFGRVLYHLSQRRGFKSNRKSGKAKEDGVVIKGANALQTEMDAKGCRTMGEYFAGLNPEEQRIRGKYTFRSMYEKEFDLLWEKQKGFYPNVLTDELCKKIRDEIIFFQRPLKPTDELIGECELEPGEKRCSRGDWYARQFRILQDVNNLIIQNPDGTEQKLTADQRKILLDELGQKEKLTFDKIRQKLGLIETQKFNAEYRIGKSGKTVESLKGDNFSWAMRNKNIFGPKKWDAIDEQEKMKLNEWLVELEDDQLKEKLRNEYGFDDKQIEAVLKISLPQGYMSFSRKAIIKLLEFMAQGALTSEAIDVVYHDRKAIGEESENLDTLPLPEDLRNPIVNKALFEVRKVVNAIIREYGKPAKVKIEMARDVQGNKRQRDELHWKQRENEERNEDVRKRLREDIGIGNPKRDDVIKYKLWDECDRRCPYTGRQISQEAFFGANTEFQVEHILPYDRSLDDSYMNKTLCEVHENIHVKKNQTPYEAYSHDPERYEQIKQNIKVLPWPKRQKFLQKEIDLDQHISRELNDTRYICKEVVGYLKQLGVNVRGTRGKITGELRHQWGLDGIFTELGLWRDDDHRRHAVDAVVVGVTENEHLRRLARSKYSVTGVFFEPPWSDFREEVREKVKHINVSHRVQRKVSGKLHEETNYGPTDKEGLYVFRKKLEDLMLPMVDKIVDPVAREIVKNRLIEKGINLEGSGKPPKEVWNEPLYMKRTKSDNQVPIKKMRVYNVAENVIAMKDPSGKTYRYVETGSNHHIEIFEYTDSKARTKRDGRVITMFEAVQRSQKGKPVVCKDYGDGKKFVCSLAINEMFILEVEGKEVLHRIQKIIHDGRIVLRPHTYGGKLSDSDSPPAIQRKSPNTLKGYKVMVDPLGRVWRAND

SEQ ID NO: 8859 - protein, 995 aa, synthetic construct
  REGION 1..995: note = Synthetic
MTDYTLGLDIGSNSIGWALIDAKGKTLVDAGVRVFQEGVDRDTKGAEVSKNETRRTARSARRARQRRNYRKDKLLRMLVRNGLLPEGEEQLANVFDLDPYALRDRGLDEQLKAYEFGRVLYHLNQRRGFWSNRKSGKAKEDGVVQKAATELKVAMSASGSRTLGEYFAGLDPHEQRIRGNYTFRSMYEEEFETLWAMQAACDGELLTDTLKKAVKDETMFFQRPLRWNPETIGDCELEAGEKRCPRSDWHARRFRILQTVNNLRVCNPDGTEGDLGTYRDLIIEELCSKKEVPFDALRKKLGLLDSQTFNYENGSAEKKTAKLKGDEFIPQLRSAVGAKDFKKLDEADIIEINDALIDEVVGDEELTGWLIEQYGFNEAQAQAVVKISLPQKYMNFSRLALQKLLPKLEAGLRTDEAIEAVYGKRQAVGAIEKAERLGRVPELRNPIVSKALWEVRKVVNALVREYDAPAKIKVEMAREVKGSAKERDEIRLKQWKNEQENKRAEEELKAMGIVKPSFNDRLKFKLWDECGRRCPYTGKSISQHALFGEHPEFQVEHILPYSRSLDDSYMNKTLCHVKENVDKGNETPYEYYAGKHPERWDEILQRIKLLPYAKRRRFWQKEVVLDNFIQRQLNDTRYITKEVVRYLKQLTSNVQGTKGQVTAELRHQWGLNSVLDYTGAGLKNREDHRHHAVDAVVTAVVENKHLHGLAGSKCDKDGTAFDAPWENFRAEVQEKINAINVSHRVTRKVSGQLHDETNYGPTGLKDEKGQDVFVYRKTLESLTIAMVGKIVDPVVREVVCERLREFGIRPEGKGTISKDVWKEPLHMKCKNGNGPQIKKVRIRDVFNNMIVMTDRDGKAYRAVAPGSNHHVEIFAYEDAKGRVKKDGRVVTMYEAVRRSVSGQPVICRDYGDGRKFVCSLAKNEMFMLKTDENEELLHRVQKLDQNGRIILRPHTYAAKLNDSDAPPLIQRRNANTLRGFKVTVDPMGRICKAHD

SEQ ID NO: 8860 - protein, 1816 aa, synthetic construct
  REGION 1..1816: note = Synthetic
MKKILGLDLGTNSIGWALIEINHENGIVKIIGLGSRILPMDAGEIGDFETSGKIKSAAAARTEKRGPRRLNERYLLRRDRLHLVLNLLDTLPRHYKLEIDFTNGKGEKCGQFKTNREPKIAYSPKKYGKKAEFLFMDAYEEMLADINDTGVRNEKRKRIPYDWTLYYLRQKALSKEITLEELAWVLLSYNQKRGYEKLDIEDNSEKDNEIIEELDLAVKEVNPKIDKEGHDVFEIQLEGNDSFIYSEDSHKKMSFKGDIKEVLKISQVNETGETDVKKTKFTITDIYELEIENVQYEKTNYKNPHKYSFHFTNGWIHSTEKKNYTSQFNKVKGRVFDYIVTSVFDYQGNFKERSFKTPDYSSETSKDWTLLKKKTEKEALKFNSDQGYKDEEGNTKNYISPKIYSILKNDARIGYRTKIIGGMFQVVERKFYREELKQIIATQREFHNSLKDAALFEKCVRTLYPKNESHAKNLLGNKDTIEHLLVEDILLYQRPLKTKKSEIADCKYEIRHWKELRDKKTGNPIEVVDKETGEITISKEAVYHKAVSASHPYFQEFRIWDKLHNLRLIQLECETDGKLSTNVDMTGKYFDMEAYQALFFKMNNQKSLDRKQFLSFCKSRFKIKDIENYVWNFPEGEELKGNETRVSFATRFKRCGFTEYVEFLTREKEIELWHYLYSVNYKERKENDNKSIQTFFNRFLNDSGISDEIKGQIIDDFTNYPKFASRYCAYSEKALKKLLPFLRMGENRFTGKFDLSTYKADLESISHDKSRISSFIASSKKVGKEAEDKKQGLYDALWKHSINERIDEILNRLSKIDFEADEIDYTIAITNQGDSKRGTLPYPKGLFKAFREFKEATDFTSLDLTKTSYLVYGRHSELAQAIQWKSPEDIRTQLHQELKQHSLNNPVAEKVILEMMQVVADIWEHKELGDSQPNYFSEIHVEVGRELKKSVKEKEAETNRQKGNKTQNRRIRQVLEEFLASSQYRANPKNSDHFERLKIVEDAVLNQHQYKKKAERDDIDSLLKAPITKETFDKYKLWIEQGYRSPYTNLPIRLTDLFDGDKYNIDHVFPQASITNDSLSNKVVCEREVNKLKSDQTGREFVNHPKEREQYCVAHGKKVKIVDDHTYVSIVTSQFSGSKRYILLSKEIPKGFTNSQLNNARHIARKAMELLSHIVREEGEVEFLSKNVLPVTGAVTGKLKEAWRLDQVWKEVVAPRFIRMNDLTKSSLFGQERVSKSGHKYFDCNLDKSIREKDESYDIKRIDHRHHALDALIVALCTRDHVNYINNINAGVKSVDFGKQRQIEKYRQTLKRKLMSSKKEDGKDDKDWHYMLPGEIRQQDAEKFTRDTVMAKSYFHKDSDSKGDYKAMVLDALQHTVVTFKQSQRVINKTVNRYNNTPNKKEFVKQEGKYNWAIRRSLGKDTFYGKMLIDGEEKIVIRKSLDTSFNSDKIKTISDAVGQTKAILTNHLKQFDTVELPFEEAISHYDALLEKEEFEAITKSEDNYIKDMNELIEYLRTNKYRFDKTDYSKLNVFVNKVPEIDFTKEITAEGKNKYKVEEHPEIAFAPEMIEEMNKPETLKKLNGGKNHTPIRKVRISRGFGNQRALNEEDKESVKSKQYVVNDAGSNLYLGFYERVYRDDDGNEVKERRFKDIGLMDLIRVLKEDKNNRHNPNDERLFDDGKNVFDRIFTLSPLDLVYVPTEEEIKNPSTVRLNNLSTEQLQRVYKYVDGGGGIANFIPYSVAKPIWRFHDDKKKNAIYKELSEKGVLNIPEKDMIKDEFGFGSQQTKNQNMIDGATQIKKICWKIRADRLGNVSKA

SEQ ID NO: 8861 - protein, 1809 aa, synthetic construct
  REGION 1..1809: note = Synthetic
MKTVLGLDLGTNSIGWALVEINHENNLVKILGLGSRIIPMEANEVKDFESKGKINSTAAQRTEKRGVRRLNERYLLRRDRLHLVLNLLDALPKHYSLDIDFTNLKGQKSGHFKKYAEPKIAYLPKTKGKKAEFLFKGSYKEMLDDIGKEYVKDEKGKRIPYDWTLYYLRQKALSKKISLEELAWVLLSYNQKRGYEKTEVEDKSIKEGEIVEELDLRVKDVIPKKDKNERQYYEVHLEGNDNFIYCERSNQQMTYKGDLKEVVKTSKIDEEGNVDNKKTEFKIVDIYELKIQDVKYEKENNKHKYTLNYENGWVEEKPPVNKFTYKYQNALNKPYDYIVETVYDYKGKNKEIRGKERLLREPDFSDNSSDWTLLKKKTEKEALKFNISQGYKNKDNSANKFISPKIYSVLKSDAKTGKHTKIIGGMFQVVDRDFYREELNQIIATQKQFYKNLQDKKVFEQCVKSLYPKNKKHQETLLKNKNAIQHLLVEDILLYQRPLKSKKSEISNCKYEIKYWKTIENKEGKPIEEIDKETGEIKVRKEPIYNKVVSASHPYFQEFRIWDKLHNLKLIEVEKIDETTGKKVTNVDVTKTYIKSEEDYQKLFKKLNNQKSLSQEQLLRFCKDNFNLPYNKKLGNFVWKFPEDDEIKGNETRVSFATRFKRCGFSEYLSFLTQSKELELWHYLYSVNYKERISNNHKSLKTFFNNFFKGYDIDEAVKEKIINDFVNYPKFDSKYSAYSEKALKKLLPLIRLSEPLGKDKWEKEQWYIKWKESLLNRIEKILQKLNLLDFSSKEIDFSKVVDTSVDVQNGELPFPKGLFNAFKEFKNKEDFKRLNLTQASYLVYGRHSELAKAKYWVSPDDIRKQLHQELKQHSLNNPIAEKVLLEMMQVVADVWDYYGRGKQNFFSRIHLEVGRELKMSAKNKDSYSKQMSGNRSQNKRIRQVLEEFLAITPYNAIPNNKDHFERLKIVEDAAVTRNNFDKKFFEENEKLKNGNITKKNIEDILKKAHITKEDFEKYKLWIEQGYRSLYSGQIIKLTDLFNGNKYNIDHIFPQALVTNNSLSNKVVVEVELNKLKSNQTARAFIQARNGQSYLGIPVCSEEEYVNVINTQFSGTKRFILLSKDIPKEFTNSQLNNVRHIARKAMELLSHIVREKGEIEFRSKNVLPVTGKITTELKRAWKLDQVWTELVAPRYMRLNKLIQPELFSDDSKEDKSCLFGRWQISKSGHQYFDCNLDKSIREKDESYDIKRIDHRHHALDALIVALCTEDHVNYINNINANSSSDNYGKQKQIEKYRQTLKRKIMFTKKDTEQNERNWFFMLPGEYREKGDVKNSRRDTVVEMTYLYKSFDSFGQDYKKMILTALQYTVVTFKQNLRVINKSINRYNNTPNKNKFAVQNTNLGQKTNWAIRRQMSKETIYGKRIVNNQELRVEREWLNEKFNRAKIKKITDRGIQQILNNHLMQFDTVKLPFEEAVKYKYLDAAIEKHELEAIVSDTTNDFNSIEDLIEYLKENKFKYQKTNYSILNVFIEKVSHRDFRDEKLENGKNRYEIDEHPEMAFTPEAIEKMNEPNNLKKLNKGKDHKPIYKVQTFQGFGKERTISEDALSVKSKQFVVTAAGSNLYLGFYERVYQDDNGNKVRERKFKDIGLIDLIETLKQDSSNRLHPLPNKIYDKKKNEFQRIFTLSPLDLVYIPTPEEIENSTKVDFQNLSTEQLDRIYKYVDGGEEIANFVPYSVSKPIWRFHGKKNKEIYNELKIENKINISEKDLIQNEFGLGSQQNKNQNMIDGKTQVKKYCWKLKVDRLGNISKA

SEQ ID NO: 8862 - protein, 1807 aa, synthetic construct
  REGION 1..1807: note = Synthetic
MKRILGLDLGTNSIGWAMVEINHKKGTLKILGLGSRILPMDATEIKDFESSGKIKSTAAQRTEKRGSRRLNERYLLRRDRLHLILDLLDALPKHYKLEIDFTNSKGEKCGQFKPNKEPKLAYLPKQKGKKAEFLFMDSYKEMLDDIGNEEIKNENGKRIPYDWTLYYLRQKALSEKIALEELAWILLSYNQKRGYEKTEVEDKSTKEGEIVEELDLRVKEVISKRTEEGKQFYEVHLDGNDSFIYNEYSDIQMTFKDDLKEVIKTSKVDEQGNTDDKKSEFKVVDIYPLKIMKVNYKKESRKHKYTLKYHNGWEENKPPRENYTFNYNNAINKFYDYIIETVYDNTGNLKTQQGKERKLREPDLNDNSSDWTLMKKKTEKEALKFNSLNGYLDERDNVKNYISPKIYNVLKNDAKTGNRTKIIGGIFQVVDRTFYCEELNQIICTQKKFHSSLEDKKVFEQCVKTLYPKNKSHQESLLKNKDAIQHLLVDDVLLYQRPLKSKKSEIANCKYEIRYWKNIEDKNGNPIENVDLETGELKVKKEPVYIKVVSASHPYFQEFRIWDKLHNLRLIQLEKEVDGRLLTNQDVTKEFFKSEKEYQELFEMLNNRKSLNQDQFLTYCKKKFNIDYQKKDSNYAWNFPDDEEIKGNETRVSFVTRFKRWGFKEYADFLTQEKEKELWHYLYSVSYKERTANDNKSASTFFNNYFKDFNIDNEIKEKIIKDFINYPMYTSRNCAYSEKALKKLIPIIQKGNKDKKYTWENEVWHKKWKSTLEKRKSEILNRLSKINFELQDDEKVDYSKVVVTNVDLQKGEIPFPKGLFNTFREFEKVEAFKDLNLTQASYLVYGRHSELPQAKYWTSPEKIRKQLHQELKQHSLNNPVAEKVILEMMQVVADIWDYYGEREEGSDNPNKLFDRIHLEVGRELKKSAKEKEAESKRMSGNRAQNKRIRQVLEEFLMHNPYNANPNNKDHFERLKIVEEGAEDRNNLDKNFFEENEELRKENITKKDIETILKKPQITIGDFEKYKLWIEQGYRSPYSGQIIKITELFDGKKYNIDHIFPQASITNNSLSNKVVVEVELNKLKSNKTARVFIQSQNGQPYLGIPVCTEEDYISIVKTQFSGTKRYILLSKDIPKGFINSQMNNARHIARKAMELLSHIVREPGEVEFRSKNVLPVTGRVTTELKRAWKLDQVWRELVAPRFIRMNELTQSNLFGDWQISKNGQEYFDCNLDESIREKDESYDIKRIDHRHHALDALIVALCTEEHFHYLSNINADKKLNDFGKQKKLEDYRLKLKRKIKFTIKDDETDEKNWRFMLPGEVRKADTENSRRDSVLEMDYQHKEFFSFGQNYKKMILTTLQGTIVTFKQNLRVINNRVNYYQAEPNTKKRKIQEPKTQKEIVNSNNKYNWGIRRSLGEATYYGKKIVNGEDKATIRKDLDTFFNSEKIKTISDSAGRVKSILLNQLKRFDTIKLPFENAVNYLDFLFEKQEFGAIISDNENEFQSIDDLIAHLRENKFKYKNTDYSELNVFIDGISERDFRNEKQFEGKIKEHPDIAFTPEAIGEMNKPENLRKLNNGKDHKPIHKVKVSRGFGKRRALNEENENSIKSKQYVVNDAGSNLYLGFYARTYQEDNGNKLVERKFKDVGLIELIETLKQDVTKRLNPLPNKIYDDKLNEYSWEFTLSPLDLVYVPTDEEIENPGKVDFNNLTNEQVDRIYKYVDGNRDIANFVPYSSSKPIWRFHGKKNKEIFKELNDNDKINISEKKLIQNEFGLGSQQNKNQNMIDGKTQIKKICWKLKVDRLGNISKD

SEQ ID NO: 8863 - protein, 1780 aa, synthetic construct
  REGION 1..1780: note = Synthetic
MKRVLGLDLGTNSIGWALVEIDHENGTVKIVGIGSRIIPMDAGEIKDFESGSKIKSTAAQRTEQRGPRRLNERYLLRRDRLHIVLNLIDTLPKHYKLEIDFKSDNGNKSGKFHKNKEPKLAYLPKQEGKKASFLFMDSYKEMLEEINDDEVENIKGKRIPYDWTLYYLRQKALSKKVNLEELSWVLLSYNQKRGYEKTEVEDKSTKDNEIIEELDLSVKEVIPKTDKEGKTFFEVHLEGNDSFIYNEFSDVQMTFKGDLKELIKTSKVNSKGVIEDKKTEFTIIDIYSLQIENVKYEKDDGKHKYTLTYQNGWKEIKQPKNFTFKYKNVLYKPFDYIIETVYNNKGQVKPQLKKDRKLREPDLSDNSSDWTLLKKKTEKEALTFNINQGYKKEDGSAKNYISPSIYNILKSDARTGERTKIIGGMFQVVDRNFYREELKQIITTQKQFHNKLEDKKVFEQCVKTLYPKNKNHQNTLLKNKNAIQQLLVEDILLYQRPLKSKKSEISNCNYEIRYWKNAEDKKGNLIEEVDIKTGEIKTKKEPIYNKVVSATHPYFQEFRIWDKLHNLKLIQLEKEVNGKKLTNQDITKEYLKSEKEYQMLFDELNNRKSLNQDQLLSFCKKSFNLDYKKKDSNYTWNFPEDDEIKGNETKVSFATRFIRCGFKDHTEFLTQEKEVDLWHYLYSVSYKEKTADANKSAKTFFNRFLENSDTTDEVREKIISDFVNFPKFASKYCSYSEKALKKILPLIRLGKQNQIDKWEKEPWYTKWNEKLYKRKKEILEKLNMVDFNEEKSDFSKVINTSIDIQQGELPFPKGLFNTFKDFEQIEDFKKLNLTQASYLIYGRHSELAQAKYWFSPDQIRKELHQELKQHSLNNPVAEKVILEMMQVVADIWDYYGKGKESFFSKIHLEVGRELKKSIKEKESDSNRMSDNRKQNKRIRQVLEEFLKNNTYNANPNNKDHFERLKIVEESAEHTKNTNKDFFKDKSYNKKEIEDILKKQYINKSDFEKYKLWIEQGYRSPYSGQMIKITELFDGNKFNIDHIFPQASITNNSLSNKVVVENSLNNLKSDRTGREFIQNQNGQSYLGTPVCSEDEYLNIVNTQFSGTKRYILLSKEIPKGFTNSQMNNTQHISRKAMELLSHIVREPGEVEFRSKNLLPVTGRVTSELKRAWKLNEVWGELVSPRFIRMNELTKSNLFGEWQTSKSGHRYFDCNLDDSIREKDDSYDIKRIDHRHHALDALIVALCTEDHVNYINNINAKAKSEDYGTQKKIEKYRQTLKRKIKFIKRDDAKDENNWYYMLPGETRKLGVENSRRDSVLEKTYIYKMHDSFDFDYKKMILTALQGTIVTFKQNLRVINNTTNWYNNTSSKNKFIKQNTENGQKKNWSIRRSLGKDSFYGKKLLSGEEKIVIRKDLDISFNSAKIRTITDIGIQKILLNHLKEYNTVELQFEEAINYFDFLLKKQEFEAIVKDEENEFQSTQDFIVHLRNNQFTYKKVKYEMLNIFINELSEDVFKNRNDRKITEHPEIAFTNELIEEMNKPSELQRLNNGKSHKPIKKVRISRGFGNQRAINGDDGESVKSKQYVVNDAGSNLYLGFYERTYINHEGNETTERKFKDIGLMDLIESLKQDKNNRINPLPNKIFDDRLNEFQRIFTLSPLDLVYVPTNKEINNLNEVDFKNLTKEQVNRIYKYVDGSISIANFVPYAISKPIWRFHGKKNKEIFKELNDKNKINIAEKELIQNEFGLGSQQNKNQNMIDGVTQIKKICWKLKVDRLGNISKA

SEQ ID NO: 8864 - protein, 1776 aa, synthetic construct
  REGION 1..1776: note = Synthetic
MKTILGLDLGTNSIGWALVEINHQNKTVKIIGLGSRILPMDAGEIGDFERSGKIKSTAAQRTEKRGPRRLNERYLLRRDRLHLVLDLLDALPKHYKLEIDFSNDKGEKSGKFKKNKEPKLAYLPKQIGKKAEFLFKESYQEMLDELSIENKKKSRIPYDWTLYFLRQKALSEKISLEELAWVLLSYNQKRGYEKTDSLDEFDDLSEKLNDFGITKSIQEVVDTSKIEIEPLILKVVEVSKSEDKWGVFFNVVLENGYSYKEYSTEQVTELNDKIDEVKIVERLTILNEEGTDIDDSKTIYRIEDIFELKVKNISPKDTKDKYLKEYSNGWKVDTNYADFNKFQKAENEIKEEVFLTRLYNNKGALVKPSKKSESLNLNISNDPFTEFKLLDPNKASNWKLLKKMTEKEALQFNSLNGYVDKNGNVKNYISPKIYNVLKNDAKTGNRTKIIGGMFQVVDRDFYREELKQIISTQQAFHTSLRDKEIFEQCVKMLYPKNKKHQDALLKNKDAIQHLLVEDILMYQRPLKSKKSEIADCKYEVQYWKTVEDKYGNPIQEVDKETGELKDKKEPIYIKVVSASHPYFQEFRIWDKLHNLRLIQLEKEIDGKKLTNQDVTKEYFKSEKEYQELFEELNNRKSLNQAQFLAYCKKKFKIDYKPKESNYAWNFPEDEEFKGNETRVSFATRFKRCGFTNYAAFLTQEKERELWHYLYSVSYKERTESNNKSITTFFTNYFKGFEIADEIKEKIIVDFANYPKFPSRYSAYSEKALKKLLPLIRLGKLEYEDAWAKESWYQKWQKSNEDRKEEILKRIKNIDYDTDKVDYEKVVNTNVDYQKGELPFPKGLFNVFRDFQSTDDFQQLNLTQASYLVYGRHSELAQAKYWTSPEDIRNQLHQELKQHSLNNPVAEKVILEMMQVVADIWDYYGNGTPNFFSKIHLEVGRELKKSAKEKEAETKRMSGNKAQNKRLRQILEEYLSHSPFKANPRNPDHFERLKIAEEGAEHTKNNDRKFFDENKVLKDAKISKKDIEDILKKSHITKADFEKYKLWIEQGYRSPYSGQIIKLTELFDGSKYNVDHIFPQSSITNNSLSNKVVVEVNLNKLKDNRTAREFIQAQQGQSYLGIPVCTDDEYVSIVKTQFSGTKRLILLSKEIPKGFISSQLNSARHIARKAMELLSHIVREPGEVEFRSKNVLPVTGMVTTELKRAWKLDEVWTELVAPRYIRLNELTQSNLFGSWQTSKNGNRYFDCNLDETIRAKDETYDIKRIDHRHHALDALIVALCTEDHVNYINNINADAKSDNYGKQKQIEKNRQTLKRKIKFTKRDDERDENNWYYMLPGETRREDADNSRRDTVVEMNYQFKEDATFGQDYKKMILTALQRTITTFKQNLRVINKRVNYYKNGPNSFARQNTDNGQKENWAIRRSLGKDTFYGKTTINGVDKITLRTALDTSFDSKKINSISDTVGRTKTILLNHLKQFDTVELPFDEAILHFGALLEKQELEAIVSDAENEIGTIEELFGHLKANNFQFKKRDYSKLNVFVEMVSDNNLRKRYEDDIKEHPEIAFTPEAIEEMNKPENLIKLNDNKPHNPINKVKITRGFGNQRALNEEDKDSVKSKQFVVNDGGTNIYLAVYELIDRSKESKSNPRRIFKGISLFDVIEYQTSTNTNNIPVDEKVFNDTGEEYRLLFTLTQNDIIKVDNAGVDLTFAFNRFTGNDIYFRPINHASEIDKCEVDLKINSKTSKLSGSQTNETTSFNGQQIKNVCIKLNVDRLGNISKA

SEQ ID NO: 8865 - protein, 1815 aa, synthetic construct
  REGION 1..1815: note = Synthetic
MKRILGLDLGTNSIGWALIEIDHEKGIVKIMGLGSRILPMDAGEVKKYKEGGKIDSTAAQRTEKRGARRLNERYLLRRDRLNLVLNLLNTLPEHYKLEIDFTNKKGEKCGQFKANREPKLAYLPKQKGEKAKFLFMDSYKEMLDDINDNGVENVKGKRIPYDWTLYYLRNKAFSEEITLEELAWVLLSYNQKRGYEKTEVEDKSTKENEIVEELDLRVKEVIPQVDEEGKHFYKVHLDGNDNFVYSEYTDIQMTFKDDLKEIIKTSKVDEQGNIDNKKTEFTIVDIYPLEIKEVHYEKDDGKHKYTLIYQNGWHEIKQPKNYTFRYKNALDKPFDYIVETVYDSKGQLKKQQGKERKLREPDLSDTSSDWTLLKKKTEKEALTFNIELGYKNNDGSAKNYISPKIYHVLKSDAKSKTGKRTKIIGGMFQVVDRDFYREELNQIIATQKQFHTSLEDKQVFEQCIKTLYPKNKNHQETLLKNKDAIQHLLVEDVLLYQRPLKSKKSEIANCKYEIRYWKDVVNKDTGEIFEKEEPVYIKVVSASHPYFQEFRIWDKLHNLRLIQLEKKIEGKSLTNQDVTKEYFQSKKDYQELFEELNNRKSLNQDQFLSYCKKKFKIDHKKNDSNYAWNFPEDEEIKGNETRVSFATRFKRCGFTEYADFLTQEKERELWHYLYSVSYKERTNNDNKSGITFFNNYFGDFDIDETVKEKIVNDFVNYPQFPSRYCAYSEKALKKLLPLIRLREEKETDKWVTEQWYRKWKEGLIIREEEILQKLKGIDFGAENIDYSEAVDTNVDLKKGEIPFPKGLFNAFRGIKKPEDFNKLNLTQASYLVYGRHSELAFAKQWESPKQIRDELHQELKQHSLNNPIAEKVLLEMMQVVADIWDYYGSGIEKFFTKINLEVGRELKKSAKEKESESKRMSGNRAQNKRIRQVLEEFLAHNPYNANPKNPDHFERLKIIEEGAEHTKNTDKEFFKDKSYSKNDIETILKKAHITKADFEKYKLWIEQGYRSPYSGQMIQITELFDGAKYNIDHIFPQASITNNSLSNKVVVEVELNKLKSDKTARAFIQSQKGQPYLGIPVCTEDEFVRIVKTQFSGTKRYILLSKDIPKGFTNSQMNNARHIARKAMELLSHIVREKGEVEFRSKNVLPVTGMVTTELKRAWKLDQVWRELVSPRYIRLNKLIQPELFNEDKEEDKSYLFGSWQKAKSGQDYFDCNLDDSIREKDESYNIKRIDHRHHALDALIVALCTEEHVHYLNNVNANKTTENFGEQKKLENYRLKLKQKIMWSKPKKENPKENDWYLMFPGEKRQDNYENSRRDSVIEMTYHFKEFDSFNSDYKKMILTALQQTIVTFKQNLRVINKTVNRYNNTPNRNKFELQKGNEVGNKVNWAIRRSLGKGTFYGRIDVGKREKKQLLKNIDFFFNYPDAIVDKNLRSQIESIKIETNSLEKFEQKLKAKFKNEKVMCIAFQAASRFNSELNITFNKEKIKSITDTGIQKILKRHLEQFDTVELPFEEALEYYDAVLEKHELEAIVNNSETEFKSVDELKQYLKANDFKYEKTNYSKLNVFIAQVSERDFRNEEQFKVKLKEHPEIAFTPEEIDKMNTPENLRKLNVNNKGEEKNHAPIRKVRTYSGFGSEKRVSNNENSNKYSQFVRVDKGTNFYIAVYQIVDSSNVSGKNPKRVFREISLFDLIDFQSSTKTNDLPVEKQVFSEDGVKYQFLFTLTQNDTVEVSTNEAKLIYAFNRFTGNELYFRPINHSSEIYKNEVDLKPINPKTGKNPGSQVNETTSVNGEQIKNICWKLKVDRLGNISKV

SEQ ID NO: 8866 - protein, 1733 aa, synthetic construct
  REGION 1..1733: note = Synthetic
MKNILGLDLGTNSIGWALIEIDHERDILKILGLGSRILPMTADEIGDFGKGSPTVSAAAFRTEKRGPRRLNERFILRRDRLHLILNLLQALPNHYKLDIDFENGKGEKSGHFKFNKEPKLAYLPKSINEKAKFLFKDSYEEMLRELGIDNKKGSRIPYDWTLYYLRQKALIKEISLEELAWVLLSYNQKRGYEKLEVESNTSKDSEVVEELDLRVRSVEKKVDKAGKVYFQINLDGSRNIMYNEYTSEQLTFENDIKELKIISFVDDKGNIDDSKTTFTVIDIYPLTITEVKYENENNKHLYHLTYNNGWQQTKRKDKYTFQFEKALDKSYDYVVETIYDKLGNIKLQSGIERKLREPNFGDNSNDWTLLKKKTEKEALAFNLDKFKEPKKYISPKIYSILKQDAISGSRTKIIGGMFQTVDRSFYREELKQIISIQQTFHQNLNDKEVFEKCVQLLYPNNKSHAKTLLTNKEAIQHLLIEDILLYQRPLKSKKSEIADCKFEIKFIKDALDSKGNPIEILNKQTGEITLKKEIIRHKVVPASHPYYQEFRIWDKLHNLKIFQLEQTVEGKVQTNVDVTKQILTSEVYNKLFELLNNQKTLTNGGFMKFLAPIFKANKWNAKDFVWNFTEDDEIKGNATRVDFAVRFKRSGFADYTEFLSQEKERMLWHYLYSVSYKERIENDFKSIRSFFQNTFFKDFSLDEVIVENLVQDFANFPKFDAKYGAYSEKALKKLLPQIKLMSDRTYAWESEGSYINYNEKLNERKQEILNKLQQIDFLADKIDYTKVVDNNSVPPYPKGLFNVFKDFESIEDFTKLNLTKASYLVYGRHSELEQAKYWHSPEQIRKELHQELKQHSLNNPIAEKVLLEMMQVVADIWDYYGEGQEDFFTSIHVEVARELKKSAKEKKRDFDRNKDNKVQNDRLRQVLEEFLSIDKYKAKPKNADHFERLKIIEDGASHTKNNKKDFFNDKSYSKKEIDDILKKSKITKEDFDKYKLWIEQGYKSPYTNRIINLTDLFDGNKYNVDHILPRASVTNDSLSNKVVCEKEINKEKSNKTAREFILNPANRSIYCSAHSGYVELVNDDDFTDIVKTQFSGSKRFILLSKEVPKEFTSSQLNNTRHIARKAMELLSHIVREEGEVEFLSKNVLPVTGEITSKLKRAWKLDQVWKQLVAPRFIRMNELTNSNLFGYWQEDKNGRKYFDCAIDDLIREKNPNFDIKRIDHRHHALDALVVALCTREHVNYINNINADAKSDNYGKQKQIEKYRETLKRKIQFSRPNKENPKDKDWFYLLPGEKRIEGEEHSSRESVLSVNYWYKDVDYGKEISHFSNMVFDILHGTTTSFKTNKFPIRKTSNKYWSYKTEAGELNILNGAPKKILIRQLTDENRKGNVAIRKGMHDEIPYGERYYDFELKELRSAIKSEKDFENIYDENLKIRLVDLFHNSNEDIKELFNNIKKEVENPFPKKAFFKADTKIKLSISRKSIVGLNEKQIDKIVSPEIYQDILEHIKNFETIDEAMSAYGIEEFNKNRKIPVKKVTFGERGDGRYVLGENDLKKSTRKMVKGANYSLFIDRNNEIVNTISLKSLIEKKDDSINVTSKSGFHLLPNDLVYVTLDGNNFDFSNLNNIYQFVNSKKDSVNFSPVNIAKVIWDYGFPNSKKEDIEYNKRLFDKGNFKSEKESPLKNEIGLGTQENKHRREFIYNVEERIHVFKGETIRDFCIKLKIDRLGNISKA

SEQ ID NO: 8867 - protein, 1745 aa, synthetic construct
  REGION 1..1745: note = Synthetic
MKRILGLDLGTNSIGWALIEVDHQNKTVKIIGLGSRILPMDAGEVKKFKEGGKIKSTAAQRTEDRGLRRLNERYLLRRDRLHLVLDLLDALPKHYKLEIDFSNDKGEKSGKFKKNKEPKLAYLPKQVGKKAEFLFKDSYQEMLDELGIENKKKSRIPYDWTLYFLRQKALSEKISLEELAWVLLSYNQKRGYEKTEVEDKSTKEGEIIEELDLRVKEVIPKTDKAGKQFYEVHLDGNDNFIYQEYSDIQMTFKNDLKELVKTSKVDEEGNTDYKKTEFTVVDIYPLEIQDVHYEKEDGKHKYILTYQNGWQETKQPKDFTFRYKNALNKSYDYIVETVYDYQGNLKTQQGKERKLREPDLSDKSNDWTLLKKKTEKEALSFNVEKGYLNSDGSAKSYISPRIYDVLKNDAKTGSRTKIIGGMFQVVDRDFYREELKQIISTQQAFHTSLRDKEIFEQCVKTLYPKNKNHQDALLKNKDAIQHLLVEDILMYQRPLKSKKSEIANCKYEVQYWKIVEDKDGKPIQEVDIETGELKDKKEPVYIKVVSASHPYFQEFRIWDKLHNLRLIQLEKEIDGKKLTNQDVTKEYFKSEKEYQDLFDELNNRKSLNQAQFLAYCKKKFKIDYKPKESNYAWNFPEDEEIKGNETRVSFAARFKRCGFANYSEFLTQQKERELWHYLYSVNYKERTANNNKSLTTFFNNYFKGFEIADEIKEKIIVDFANYPKFPSRYSAYSEKALKKLLPLIRLGKLEYEDVWAKESWYQKWRDGLVERQEEILKRIKNIDYDTDKVDYEKVVNTNVDYQKGELPFPKGLFNVFRDFQSTDDFQQLNLTQASYLVYGRHSELAQAKYWTSPEDIRNQLHQELKQHSLNNPVAEKVILEMMQVVADIWDYYGQGAPNFFSKIHLEVGRELKKSAKEKEAETKRMSGNKAQNKRLRQILEEYLSHSPFKANPRNPDHFERLKIAEEGAEHTKNNDRKFFDENEELKGAKISKKDIDDILKKSHITKEDFEKYKLWIEQGYRSPYSGQIIKLTDLFDGSKYNVDHIFPQASITNNSLSNKVVVEVNLNKLKDDRTAREFIQAQQGQSYLGIPVCTDDEYVNIVKTQFSGTKRLILLSKEIPKGFISSQLNSARHIARKAMELLSHIVREPGEVEFRSKNVLPVTGMVTTELKRAWKLDEVWTELVAPRYMRLNELTQSNLFGSWQTSKNGTRYFDCNLDETIRAKDESYDIKRIDHRHHALDALVVALCTEDHVNYINNINADAKSDNYGKQKQIEKYRQTLKRKIKFTKRDDERDENNWYYMLPGETRREDADNSRRDTVVEMNYQFKGDATFGQDYKNMVLTALQNTITTFKQNLRVINKRVNYYKNSPNSIARQNTDNGQKENWAIRRSLGKDTFYGKTTINGVDKITLRTALDTSFDSKKINSISDTVGRTKTILLNHLKQFDTVELPFDEAILHFGALLEKQELVAIVNDAENEIGTIEELFGHLKVNNFQFKKRDYSKLNVFIEMVSDIDLRKRYQDDIKEHPEIAFTPEAIVEMNKPENLIKLNDNKPHNPINKVKITRGFGNQRALNEEDKDSVKSKQYVVNDAGSNLYLGVYEIKDKETLQENKKLKKRIYKGIGLIDLIDFQKTNGLNPPFENRLFENNYEYQFLFSLSPDDIVKIEHNNEDHYFAFNNYTESKVYFRPVNHSKEIDKTEVDKRIDIKNNKLIGSQENKTEYFENVRIKDVCWKLKVDRLGNISKA

SEQ ID NO: 8868 - protein, 1807 aa, synthetic construct
  REGION 1..1807: note = Synthetic
MKTILGLDLGTNSIGWALIEIDHQKGIVKIIGLGSRILPMNAGEIGDFERGTKIKSTTAQRTEYRGTRRLNERFLLRRDRLHLVLDLLDALPEHYKLEIDFTNSKVKKCGQFKKNKEPKIAYLPKQKGKKAEFLFMDSYLEMLDDINCDKVKNTKHKRIPYDWTLYYLRQKALSKKITLEELAWVLLSYNQKRGYEKTEVEDKSTKTNEIIEELDLKVKDVIPKKDNNNRQYYEIHLEGNDNFIYKEYSDIPLTSKDDIKEVIKISKVDDEGNIDNKKNEFKITDIYPLEIKDVKHEKLNGKHIYTLTFQNGWIEEKLPIKKFTFRYKNVINKPYDYIVETVYDYQGNIKTKQGKERTLREPNFDDTSSDWTLLKKKTEKEALVFNLRQGYTNNNGDVKKYISPKIYSVLKNDAIKGTHTKIIGGMFQVVDREFYREELNQIINTQRKFHTCLEDKKLFERCVKTLYPNNENHQKSLLENKNAIQHLLVEDILLYQRPLKIKKSEISDCKHEIRYWKRIENKDGKVTKEPVYLKAVSKSHPYFQEFRIWDKLHNLRLIQLEKEINGEKFTNQDITKEYFKREDDYLELFDKLNNSKSLNQDQFLSYCKKKFKINYDKKASNYVWNFPEDEEIKGNETRVSFATRFIRCGFKDYKDFLTQEKELRLWHYLYSVNYKVRTDNNNKSIRTFFNNFFEGYNIDDSTKEKIILDFANYPKFESMYCAYSEKALKKLLPLIRLAKRDKEDTWITEKWYKKWLVELNNRKNTILTKLKDIDFSDDEVDYSNVVNVEVNVQKGEIPFPKGLFSAFKGFEKVEDFAKLNLTQASYLVYGRHSELAIAKYWKSPDEIREQLHKELKQHSLNNPVAEKVILEMMQVVTDIWEIYGKSKENFFSEIHLEVGRELKKSAKQKQNDSTQMSANRAQNKRLRQILEEFLNNSTYNAIPNNYDHFERLKIVEEGAETRKNYDKSFFDNKPYSKKDIDEILKKTHITKQDFEKYKLWIEQGYLSPYSGQIIKLTDLFNGAKYNIDHIFPQASITNNSLNNKVVVEVELNQLKGDRTAREFIQAQNGQPHPETGTKICSEEEYLSIVNAQFTGNKKHILLSKDIPKEFTNSQMNNMRYIARKAMELLSHIVREQGEVEFRSKNVLPVTGAITNELKRAWRLNKVWTELVSPRFIRLNKLTQSNLFGEWQISKNGNRYFDCNLDTTIRDKNESYDIKRIDHRHHALDALIIALCTEDHVNYINNINADAKYDEYGKQKQIEDYRLELKRKIKFTKKDNEKDDNNWYYMLPGEARKKDAKNSKRDSIIEMCYMYKDMAPFGQDYKKMILTALQDTIVTFKQNLRVINKTVNYYQKWVKQYDDSMKKVLVKQTKGDHWAIRRSLGEKTFYKKIDIKDRENKQLHKNAEFFYHHTEAIVDEELRDKIQKLKEETKSEDIFKIKLKETFDNILVECIAYKIASRAKNEIGEKFTSKKIKTISDREGQTINILLNHLKQFDTVTVSFEEGIRYFDSILEKEELITIANDENNNFQSIDELIKYLRENDFKYKKSNYSELNVFIDKISDRDFRNDARYIDKIKEHPEIAFSPTYIEKMNDKDELKRLNGGKPHKPIKKVSTFQKFGTQRPVSKNKHSVKSRQYVVNDGGTNIYLAIYEIEDKSKISKKSPIRLFREINIFDIIEFQKATNSNNLPVEKFIFSNEGERYNFLFTLTQNDVVKVKNGSTDKIFAFNRFSQGDVYFRPINHAFEIYKCEVDLKINNKTGKLIGSQENETTSFNGEQIKNTCWKLEVNRLGQIKKQSYDQKNSLLR

SEQ ID NO: 8869 - protein, 1790 aa, synthetic construct
  REGION 1..1790: note = Synthetic
MKRILGLDLGTNSIGWALVEIDHEKRVVKIIGLGSRILPMDAGEIGDFERGGKIKSSAAQRTEKRGARRLNERYLLRRDRLHLVLDLLDALPTHYKLEIDFTNSKGEKCGQFKTNKEPKLAYLPKHKSERAKFLFMDSYEEMLDNINDDNVKNIKGKRIPYDWTLYYLRQKALSEEISLEELAWVLLSYNQKRGYEKTEVEDKSTKDTEFVEELDLRVLDVFEKEKDGKKYFEIHLDGNDKFIYNEYSDIQMTFKGDLKEVVKISKVDDEGNTDEQKTEYKIIDIYSLEIQKFDYEKIDAKHKYILTYKNGWIETKLTANYYSFKYKNALNKPYDYIVETVYDNHGNIKTQQGKERKLREPDFGDNSSDWTLLKKKTEKEALAFNSENGFLHDNGDVKKYISPKIYSVLKNDAKKGTQTKIIGGIFQVVDREFYREELNQIISTQKQFHNSLKDRKIFEQCVKTLYPKNESHQKSLLENKDAIQNLLVEDILLYQRPLKSKKSEIADCKYEIRYWKDVVDKETGEIKTKQQPVFIKVVSKSHPYFQEFRIWDKIHNLKLIQLEKEVNGHKQTNQDVTKEFFKSDKEYQELFNELNNRKSINQEQFLTYCKKKFNIDYNSKDSNFVWNFPEDEELKGNETRVSFATRFKRCGFSNYKDFLTQAKELELWHYLYSVSYKERVAKDKKSITTFFNNYFKDFEIEKEIKEKIINDFSNYPKFKSNYCAYSEKALKKFIPIISLGEHNNEYSWTNEKWYKDWQATLEIRKIEILDKLKKIDFSADKPDYSKVEHTDVDYSKGELPFPKGLFNVFKDFKHPEDFNKLNLTEASYLIYGRHSELAFAKHWKSPEQIREELNKELKQHSLNNPVAEKVLLEMMQIVADIWEYYGNAEKDFFSRIHVEVGRELKKSAKKKKEEYERMSKNRSQNKRLRQILEEFLSNDSFKANSNNSDHFERLKIAEEGAEHRSNIDKEFYEKDEKLKAKNISKKDIDGILKKAHITQQDFEKYKLWIEQGYRSPYSGEIIKLTDLFNGSKYNIDHVFPQASITNNSLSNKVVVEVELNKLKGDRTGREFIQQQKGQKYLGIPVCTEDEYEKIVKEQFSGQKRYILLSKEIPKGFIDSQLNTSRHIARKAMELLSHIVREQGEVEFRSKNVLPVTGAVTTELKRAWKLDEVWVELVTPRFIRLNELTQSNLFGRWQTSKKGQKYFDCDLDKTIRDKNEAYDIKRIDHRHHALDALIVALCTEEHVNYINNINANAKSSEYGKQKQIEKYRQTLKRKIKFTKKDDANNENDWHYMLPGEKRMDNAENSNRNFVIEMSYNFKDYDTFHRNYKKMILTALQQTIVTFKQNLRVINNRVNYYQAEPNTKQRVAQEPKTQKEINSSSNKYNWGIRRNLSKETFYGKRIINNEEMRIERELLNDTFKKTKIDKIYDNVVKQILLKYLSQFDTVKIPFEEAIVYFDALLEKEEFNAIINSNEKNIKSLDDLIRYLRTNNLKYDKTSYANLNVFVDKVTERSFRNEKLADGSSKYEIIEHPEIAFTPEQIEKMNEPQEIERLNNGIKHKPIKKVQVYQGFGKERPLSESEFSVKSKQYVVTAADSNLYLGFYERVYHDEKGKYITERKFKDIDLIELIEVLKQDFSKRLSPLPNKLFDNEMNEYVCKFTLSPLDLVYVPTEKEVENPSLVDIKNLSKEQIERIYKYIDGSEVHANFVPYSVAIPIWRFHGQMKKEIFKELNESKKLLISEKNLIQNEFGLGSPQNKNQNMIDGVTQIKKYCWKLEINRLGQIQKVLR

SEQ ID NO: 8870 - protein, 1791 aa, synthetic construct
  REGION 1..1791: note = Synthetic
MKKILGLDLGTNSIGWALIEIDHGQRYVKIIGLGSRILPMDSGEIGDFEQSGKIKSSAAQRTEKRGPRRLNERYLLRRDRLHLVLDLLSALPEHYKLEIDFTNVKGEKSGKFKANKEPKLAYLPKQKGEKAKFIFMDSYVEMIDDINVNNIKNTKGNRIPYDWTLYYLRQKSLSKKISLEELAWVLLSYNQKRGYEKTEIEDKSTKDNEFIEELDLRVKEVIPKIDKAGNKLFEIHLDGNDGFVYYEYSDIQMTFENDIKEIIKTSKVDDEGNTDNKNTQFKIVDIYPLTITDVKYEKDNEKHKYTLTYDNGWNEVKDQKNFTFKYKNALNKTFDYIVTTVYDINGEVKNQQGKERTLREPDFSDNSSDWTLLKKKTEKEVLAFNIDQGLKKEDGSAQNFISPKIYNVLKNDAKSNIHTKIIGGMFQVVDRDFYREELSQIITTQKQFHTSLEDKKIFEKCVETLYPKNKNHQDALLKNKDAIQYLLVEDVLLYQRPLKSKKSEIADCKYEIRYWKDIEDKNGNPLKEVDIETGEIYVKKEPVYIKAVSASHPYFQEFRIWDKLHNLKLIQLSKEVDGNTLTNQDITKEYFKSEKEYQELFDEINNRKSFSQEQFLSYCKKKFKIDYKPKDSNFTWNFPEDEEIKGNETRVSFVTRFKRCGFSNYIDFLTQEKELELWHYLYSVSYKERITNENKSINTFFKNYFKDFDINLEIKEKIVNDFVNYPKFDSKYCVYSEKALKKFIPLINMGENNQKYAWKNEKWYQDWQKSLDARKSEIIERLKSIDFEKDDIDYSKAVHINVDLQKREIPFPKGLFNTFREFEKVEEFEKLNLTQASYLIYGRHSELAQAKYWTSPDDIRKQLHQELKQHSLNNPVAEKVILEMMQVVADIWEFLGEKQKNYFSEIHLEVGRELKKSAKEKEAETKRMSDNRSQNKRLRQVLEEFLANSHYNANPKNSDHFERLKIAEEGAEHRSNIDKKFFEDNEKLKAGNITKKDIDEILKKSYVSKEDFEKYKLWIEQGYRSPYSGQIIQLTDLFDGTKFNIDHIFPQALVTNDSLSNKVVVEVDLNKLKDNRTGRDFIQQQRGQSYLGIPVCSEEKYIEIVKQQFSGTKRYILLSKDIPKEFTKSQLNTTRHIARKAMELLSHIVREPGEIEFRSKNVLPVTGEITTKLKRAWKLDEVWTELVAPRYIRLNELTQSKLFGSWQISKNGKKYFDCNLDNSVREKDESYDIKRIDHRHHALDALIVALCTQEHVNYINNINADAKSNNYGKQKQIEKYRQTLKRKIKFTKKDDEKDENNWYYMLPGEKRLNNVENSNKSSVIEMEYLFMEFETFHSNYKKMILTALQNTIVTFKQNLRVINKRVNRYNNTPNKNKFEKQNTENRQKQNWAIRRSLGKETFYGKQTIDGEEKIVIRKNIDTSFDGNKIRTISDTLGFTKTILFNQLKQYDTIELPFDEAIFHFEALLEKEEFEAIVNDDDNNIKSIDELFSYLKQNKFRYKKSDYKYLNVFIDQISSRNFRNEDQFNDKIKEHPEIAFTPEAIEEMNKYENIKRLNNGKEHKPIKKVTITRGFGKQRAVSENEASVKSKQFVVNDAGSNLYLGFYERSHKDLNGIDMVERKFKDIGLIELIETLKQDSSKRINPLPDKIYDDKLNEYFWKFTLSPLDLVYVPTDEEIQNPSIVNFNDLTQEQIERIYKYVDGSEDVANFIPYYATKPIWRFHGKKNKEIHKELSENNKLAISLQDLIQNEFGLGSQQDKHQNMMNGKTQIKKICWKLEINRLGQIKKVIR

SEQ ID NO: 8871 - protein, 1240 aa, synthetic construct
  REGION 1..1240: note = Synthetic
MPNFWSIFTENLQTYLMKTRILGLDTGTNSLGWAVVDRDENNQYTPICRGDLIFTEGVKQEKGIEFSLAAERTSYRASRRHYFRRRLRKVEVLKVLVKHKLCPPLSDEALNRWHTKKEYPLDEDFILWQRTNEADNKNPYHDRHICLHRKLNLKDSQTDRYTLGRALYHLTQRRGFLSNRLDQNEEAEETGKVKSAISELSKEMKEAGCEFLGDYFYLLYRTEGNRVRIRSRYTDREKHYLQEFKEICRVQELDEDLAKALEKTIFFQRPLKSQRQGVGKCTMEKGHSRCAVSHPLYEEYRLLCYLNNIRIKTPFDDRLRPLNAEEREKITPLFYQKSNFDFKKIAKKLAGKTPFGWIRDEEDWPYQFNYRMTQEAPACPTTAQLIKVFGEDWKAALAETYTMSTKQDGTLKTEDEICTDIWNVLYSFSSKEKLKEFGLKKLQLDEAQAKAFSEIRLTRDFASLSLKAIRKILFFLRTGEDYSKAIFLANIPTIVGEEIWSNIERRSRLLYKVDVALHPQEEDEAEEHRTIAERIKAAVAAEVPDAPIDLLYHPSMIEAYPDAKRNERFDCYQLGSPKTNAVRNPMAMRSLHMVRKVINHLLRKHIIDEKTEIHIEYARELNDANKRQAIADWQRELSKRHTAYAQNIRQLYKAETGLEIEPTKTDILKYQLWEEQQHVCLYTGKKIGIADFLGANPKFDIEHTIPRSRGGDSTQENLTLCDSKFNRDTKRDKLPTELTNYEEILARIEHWKKQCYALKLKRDGIRTHSGLEKSIKDSKIRRRHLVGLEYGYLKGKYDRFTMKEVPEGFSRRQGAGIGLISKYAGLFLKSLFKDPKNPNRSNVYVVKGAITAEFRKLWGLQQADEAKSRDNHTHHCIDAYTIACIGPCEYAALAAYYRSDEEFKYGRRREKPQFEKPWPTFTEDLLKLQEELLIVHQTTDKLGKRDRRKVKTPRGKFLTGGDSARGRLHQETYYGAINYDGNIKYVVRKPLDSLTEKDLDKIVDETVKGIIKGAVEAKGSLKEALADGIYMNKEKGILIKRVRIFTRLTQPLTLRSLRDQSQKEHKRKVYVTNEGNYMMAIYEGVVKGKTKREFDLVNNIEAAKFFRKRIGQEQDLPLMPEKSASDFPLKHTLKIGTLVLLYETSPSEINFSDPKDIAKRLYKVVGLSTLHINKYIYGIISLRHHQEARPTGELKFKNGEFKNGEALRPAITMLHTQFNALVEGQDFDLDITGKITLKRP

SEQ ID NO: 8872 - protein, 1234 aa, synthetic construct
  REGION 1..1234: note = Synthetic
MPNFWSIFTENLQTYLMKTRILGLDTGTNSLGWAVVDRDENNQYTPICRGDLIFTEGVKQEKGVEFSLAAERTSYRASRRHYFRRRLRKVEVLKVLVKHKLCPPLSDEALNRWHTKKEYPLDEDFILWQRTSEADNKNPYHDRHICLHRKLNLKDSQTDRYTLGRALYHLTQRRGFLSNRLDQNEEAEETGKVKSAISELSKEMKEAGCEFLGDYFYLLYRTEGNRVRIRSRYTDREKHYLQEFKEICRVQELDEDLAKALEKTIFFQRPLKSQRQGVGKCTMEKGHSRCAVSHPLYEEYRMLCYLNNIRIKTPSDDRLRPLNAEEREKITPLFYQKSNFDFKKIAKKLAGKTPFGWIRDEEDWPYQFNYRMTQEAPACPTTAQLIKVFGEDWKAALAETYTMSAKQDGTLKTEDEICTDIWNVLYSFSSKEKLKEFGLKKLQLDEAQAKAFSEIRLTRDFASLSLKAIRKILFFLRTGEDYSKAIFLANIPTIVGEEIWNNIERRSRLLNKVDLALRPQEEDDAEEHRTIAERIKAAVAAEVPNAPINLLYHPSMIEAYPDAKRNERFDCYQLGSPKTNAVRNPMAMRSLHMVRKVINHLLRKHIIDEKTEIHIEYARELNDANKRQAIADWQRELSKRHTAYAQNIRQLYKAETGLEIEPTKTDVLKYQLWEEQQHVCLYTGKKIGIADFLGANPKFDIEHTIPRSKGGDSTQENLTLCESKFNRDTKRDKLPTELDNYEEILARIEHWKKQCYALKLKRDGIRTHSGLEKSIKDSKIRRRHLVALEYSYLKGKYDRFTMKEVPEGFSRRQGAGIGLISKYAGLFLKSLFKDPKNPNRSNVYVVKGAITAEFRKLWGLQQVDEAKSRENHTHHCIDAYTIACIGPCEYAALAAYYRSDEEFKYGRRREKPQFEKPWPTFTEDLLKLQKELLIVHQTTDKLGKRDRRKVKTPRGKFLTGGDSARGRLHQETYYGAINYDGNIKYVVRKPLDSLTEKDLDKIVDETVKGIVKGAVEAKGSLKEALTDGIYMNKEKGILIKRVRMFTRVSDPIKLKQLRDISSKGYKQHIHVNKEENYLIAIYEGLNKKNQKQTETYTVDYLDAAKFYKDSKRRDKTNNLVSDYSEKYKLPLKYILKKRQMVLFYEHSPEEIRFRDKKDLSKRLYIVTCIEKDGRIQLLHHQTANTAGIKPSSSPFTNDGEHQTFYRLRASKLNILVAGVDFDINILGKITSKLQ

SEQ ID NO: 8873 - protein, 1228 aa, synthetic construct
  REGION 1..1228: note = Synthetic
MDADMTKILGLDLGTASIGWALVERNDTGYALLDQGVDIFQEGVAREKNSEKPAVQDRTAARALRRHYARRRLRKIDLLRVLVRHDLCPALTDEQLKDWKQKKIYPLTDEFIRWQRTDDRTDKNPYRDRYKALTETLDLDTQRDRYTLGRALYHLAQRRGFLSNRKDAGDESESGKVRQNIEDLTVDMEKAGCAYLGEYFYRLYARKEKIRTKYTSRNEHYLAEFRAICEKQRLADDLRKALHRAIFYQRPLKSQKGSVGRCTFEKGKSRCPVSHPRFEEFRMLSFVNNIRITTPDDPEPRPLSRQETETILPLFRRRTKSHFDFEEIAKKLAGKGRYACQGDRSEAPYRFNFARTATVTGCPVTASLIALFGDDYLTKICDLYTLGVGKTREQILGDVWHALFSFDDEERLSAWAKQKLRLSDDEAGRFAAIRLPQDYAALSLHAINKILPYLREGYRYDEAVFVANLKAVLPPDIYSDESERSAIEADIAALITDFRRNPLNRGTTKEQCVRDYLRNCRGIDEKRLGRLYHPSMIEIYQTAQPDAQGILQLGSPRTPAVRNPMAMRALFRLRVLVNRLLRDGKIDRETKIHIEFARGLNDANRRKAIELYQRDREAERKAYADEIRRQYASESGREIEPTDDDILKYRLWKEQNHICPYTGKQIGLSDFMGDSARFDIEHTVPRARGGDNSQMNKTLCESRFNRELKRDKLPSELPNHADVMARIDEFGWPEKIAGLQKQIEIQRRKSKSATTKSEKDGAIQRRHVLQMQLDYWRGKYERFTMTEVPDGFSNRQGVDIGMIGKYARLYLKTVFERIYTVKGATTAEFRRMWGLQEEYARKERVNHTHHCLDAIVIACIGRNEYDRWAQYAGDEERYRRGEGAKPRFEKPWPTFTEDLEAVADRLLVAHHTPDNMPKQSRKRLRIRGRIRTGRNGETLYAQGDTARGALHQQTFYGAIERQGEVRYVVRKPLGQLQPSDVDNIVDDAVRQKVKEAIKAVGFKTAMDTESHPIWMNEQKRVPIRKVRIFAGKNISPKPLGGKKHRDLSALPHKRPVYVSYGSNYCMAIYEGKDNQGKLKRTFEIVSTLEAAQYFKASADKAARPDLVPQSDANGFPLKCILKTGTMVLFYEETPEELYECTQQELAKRLYKLTKFSSMTTGNNSYGLCTFRHHQEARPAGELKPKGGAWKAGEAYRPLISLYHTQLNAYVEGFDFELSVTGTVRFKHE

SEQ ID NO: 8874 - protein, 1216 aa, synthetic construct
  REGION 1..1216: note = Synthetic
MKRVFGIDLGTNSIGWSIVEQLENGKYRHIKSGVDIFKDGVDHDKSGEHPCVQLRTNARGLRRHYFRRRLHKIELLKILIEERMCPPLTDEDLKRWRFKKIYPKEDNFMEWQRTNDNLDKNPYHDRYVALTRKLDLSIECDRYILGRAFYHLSQRRGFLSNRKDSTKEQEGEVKAAISELSDKIKEAGCSYLCEYFYKLYQAGDKIRGHYTARNEHYLKEFQAICDKQSLGADLCKRLNNAIFYQRPLKSQKGNIGRCTFELGKQRCSTSHPAYEEYRMLCFINNIRLHRQGEDSDFRVLTKEEVDAIIPKFVCKSQFKFEKLAKVLAHKKENYGFKYDSDESTLKFNYRKETSIAGSPVTAGLKEIFGEEWKSEICSVYMKSEGKTEDRIIDDVWHVLYSFDNDENIRDWAKKNLQLDDEQAEKFAKIKIERDYASLSLNAIRKILPYLRRGLRYDEAVFCANIPAALGNVEDVDEYRKIEDDVVACVRNFKSCEVAGRKNTLEKEVAELLEEKYGVDKRHLGKIYHPSKTETYPTAQPDNNGLRLLGSPRTASVRNPMAMRALFRLRALTNELLKKGEINSETVVNIEFARGLNDANMRKAIENYQREIADRHQKYAKEIKDCYLKETGKNIEPTENEILKYQLWEEQNHQCLYTGKMISVADFIGANPKFDIEHTLPRAAGGDDSQVNKTLCDSRFNREVKKAHLPSELANHAEILLKAKNLWQKKIYELTKQIEGTKGYAADKNAKDGKIQRRHLLKMKRDYYIGKLQRFEMKEVPTGFSNRQGVDIGIIGKYAKLYLHTVFDKIFVVKGATTAAFRKVWGLQSVYEKKERINHVHHCVDAITIACIGKKQYDDWKCYQEAEDMYYRGETGRPSMDKPWSTFTEDVKQLTEGLLIHHYVPDNAGKASKKKLRVRGRIQRNAEGRALYATGDCARLSLHQQTFYGAIKQDDEIRYVVRKPLDSLEKKDIEKIVDPEVRQKVKEAVDAKGMKDAVADGIWMNEEKRIPIKKVRIYTSIANPLRLKRQRDLSVHDYKRDYYVANDGNYCMGIYEGTDAKGKKKKTFKIVNNMDAASYFKARQRGEDVELLPMSDGNDFPLKCVLKTGSVVLFYQDTPKELKECSKKELAKRLYRVVGMSEMKIKQKTGKIDCYGMLSLTFHQEARPSSDLKDKNGVWRIGEDVRPKIKLTHNQTNFLVEGIDFRLTLSGDVEWLK

SEQ ID NO: 8875 - protein, 946 aa, synthetic construct
  REGION 1..946: note = Synthetic
MLSFVNNIRITTPDDPEPRPLSRQEAETILPLFTRKTKPHFDFEEIAKKLAGKGRYACQGDRGEAPYRFNFARTATVTGCPVTASLIALFGDDYLTKICDLYTLGAGKTREQILGDVWHALFSFDDEERLSAWAKQKLRLSDDEAGRFAAIRLPQDYAALSLHAINKILPYLREGYRYDEAVFVANLKAVLPPDIYSDESERNAIEADIAALITDFRQNPLNRGTTKEQCVRDYLRNCRGIDEKRLGRLYHPSMIEIYQTALPDAQGILQLGSPRTPAVRNPMAMRALFRLRVLVNRLLRDGKIDRETKIHIEFARGLNDANRRKAIELYQRNREAERKAYADEIRRQYASESGREIEPTDDDILKYRLWKEQNHICPYTGKQIGLSDFMGDSARFDIEHTVPRARGGDNSQMNKTLCESRFNRELKRDKLPSELPNHADVMARIDELGWPKEIASLQKQIEIQRRKSKSATTKSEKDGAIQRRHILQMRLDYWRGKYERFTMTEVPDGFSNRQGVDIGIIGKYARLYLKTVFERIYTVKGATTAEFRRMWGLQEEYARKERVNHTHHCLDAIVIACIGRNEYDRWAQYAGDEERYRRGEGAKPRFEKPWPTFTEDLEAVAGRLLVAHHTPDNMPKQSRKRLRIRGRIRTGRNGETLYAQGDTARGALHQQTFYGAIERQGEVRYVVRKPLGQLQPSDVDKIVDDAVRQKVKEAIDAVGFKTAMDTESHPIWMNERKRIPIRKVRIFAGKNLSPKPLGEKRHRDLSALPHKRPVYVSYGSNYCMAVYEGKDNQGKLKRTFEIVSTLEAAQYFKASADKAARPDLVPQSDANGFPLKCILKTGTMVLFYEKTPEELHDCTQQELAKRLYKLTKFSSMTKGNRSYGLCTFRHHQEARPAGELDSKGTAWKAGEAYRPIISLYHTQLNAYVEGFDFELSVTGTVQFKHG

SEQ ID NO: 8876 - protein, 691 aa, synthetic construct
  REGION 1..691: note = Synthetic
LECALFIFFERQVKAFATEKLQLDEASATKFANAKLPHGFASLSLKAIRNILPFLRQGFIYAHAVHLAKIPDIVTKAVWNDADKREMILSGLMEIIENYNPKDRGVEGTIDFCIKSHLQDVIDLRPGAADALYHPSMIETYPDAKLNKMGVFQLGSPRTNAIRNPMAMRSLHILRSVVNQLLRDGIIDRNTEVHVEYARELNDANKRKAIADYQREQEKKRKQYRDDIIALYKSECHKEIEPTDTDILKFQLWEEQDHLCLYTGTQIGICDFLGDNPKFDIEHTVPRSVGGDSTQMNLTLCDATFNRQVKGAQLPSQLSNHADILVRIDHWKSKCEDLRKQLDKIRTYGGMEKAMKDRLIQKRHRLKMDLDYWQGKYSRFTMTEVTEFSRRQGAGIGLVSKYAGLFLKSLFHNEQNPNKSNVYVVKGVTTAEFRRMWGLQGEYEKKSRLNHCHHCIDAITIACIGKAEYDKMAQYYHDEELFQWRGTTTKPHFNKPWPTFTEDVLAIEQSLLVKHLTKDNMPKQAKKRVRTATGKYLAQGDTARGSLHKDTYYGAIEQDGEIRYVLRKPLNKFENEAELEKIVDQAVKEKIKEAIAGKNFKTAITEPIFMNKEKGIRINKVRYYVKAQERLKIRQQRDLSSKEYKQFFCVENESNYLLAIYEGELKGKKETRFLCCQQLGVCRLFKEEQQR

SEQ ID NO: 8877 - protein, 567 aa, synthetic construct
  REGION 1..567: note = Synthetic
VPIHKRRDWHLRFLGDNQKFDIEHTIPRSVGGDSTQMNLTLCDATFNRQVKGARLPSQLTNHADILKRIAPWKSKCEDLRKKLDKIRTYGGMEKKIKDKLIQKRHRLKMELSYWQGKYERFTMTEVPEGFSRRQGAGIGLISKYAGLFLKSLFHSAGNPNKSNVYMVKGVLTAEFRRMWGLQGEYEKKSRLNHCHHCIDAITIACIGEAEYEKMAQYYHDEEVSRWYGSANKPHFKKPWTTFTEDVLAIEQSLLVKHLTKDNMPKQAKRRVRTAKGKYVAQGDAARGSLHRDTYYGVIEKDGILYHVLRKPIDKFEKESELEKIVDQAVKEKIKEAIAGKNFKAAIAEPIFMNKEKGIRINKVRCYVKAQERLKIRQQRDLSTKEYKQFFCVENENNYLLAIYEGELKGKKERDFCVVNNLDAAAYLKRSNKGKAAQLVPERSAERNFPLLAVLQRGTQVLFYEDSPEEILFDNPQDLVRRLYKVVGINTKKDVKKGKTYLYGNIELRFHQNAQKKDDVKMESGGYKNNEAPHQGIVLSHNQFKALVEGIDFEFNILGEIKKKEHHA

SEQ ID NO: 8878 - protein, 830 aa, synthetic construct
  REGION 1..830: note = Synthetic
MLNDVWHALFSFNDEGRLRSWACEKLQLTDEQAKAFAAIKLPQDYAALSLNAIGKILVYLRCGYRYDEAVFLANLRAALPKEVYADESRRHEIEQDIASLLLDYKRNPYNKFDSKEHRIADYFSDHGLDASRLIRLYHPSKIETYPDAQPKANGILQLGSPRTATIRNPMAMRALFRLRNLINTLLREGRIDRDTKIRIEFARGLNDANRRKAIEQYQREREVENRKYAEEIHSQYAAETGREIKPSDDEVLKYRLWEEQQHVCPYTGRQIRISDFVGSAPDFDIEHTLPQARGGDDSQMNKTLCENRFNRETKRAKLPAELSNHVEIMERIESFGWREKMESLQKQIEAQVRRSKSAAIKSEKDDAIQRRHYLQMQLDYWRGKYERFTMAEIPEGFSNRQGVDIGIIGKYARLYLKTVFDRIYTVKGSTTAAFRKMWGLQEEYARKERTNHVHHCIDAITIACIGRREYDRWAQYVADEERYGYGESGKPRFEKPWPTFTEDVKAAADELLVAHHTPDNMTKQTRRKLRVRGRIKLNADGEPIYQQGDTARCRLHQDTFYGAIKQDGEIRYVIRKSLTQLQPTDIDKIIDDAVRDRVREAIDEVGFKTAMNPDEYTIWMNREKGIPIRKVRIFTPSVKHPIALKKQRDLSAKEYKRDYHVVNEGNYCTVIYEGQDKKGKTKRTFELVSNLEAAQYFKASADREARPDLVPQTDTNGFPLKCILKTGTMVLFYENSPAELYDCSHKELTKRLYKVTAMAAEGRVQFLFHQEARDQKTLTSLYGAGTSQFCQSNPSPKLRLSVSNFNMLVEGYDFELTVTGEIKFKDDRPC

SEQ ID NO: 8879 - protein, 978 aa, synthetic construct
  REGION 1..978: note = Synthetic
MVEELTRALYFQRPLKSQRQNVGKCTFEKGKPRCSDSHPMYEEYRMLSFLNNVRIQGPWDVNGYRPLNEEELKKIEPLFYRKSKPNFDFEDIAKKIAGPKQYQWKGETMLDLPYKFNYRMSQGVSGCPTIAQLREVFGDDWKQNIAETYTLNTKKDGSQKSIDDMVNDVWNVLFSFDSKDKVSEFGKIHLQLDEEQAEKFSKIRLSRDYASLSLKAIRNILPFLQMGMLYSHAVFMANIPKIVGPAIWNDEKQRNHIIDEICKMAADAPIEKEKGLRQTLDICIKDLLSKEYGIKEEKLECMYHPSMIETYPDARPNKDGVVLLGSPRTNAIKNPMAMRSLHEVRKVVNTLIKEGKIGPDTEVHVEYARELNNANMRAAINDLQRENDKKHKQFADEIRTLYKEETGKDIEPTETDILKYQLWEEQEHFCIYTGKKIGITDFIGAGPKFDIEHTIPQSVGGDSTQENMTLCDNHYNRFVKKAQIPTSLPEHEEIMTRIEPWKKRIDDLTKQIDQIRTRYVWDKTTKDARIRRKNRLKLELKYWKGKYNRFTMTEVPEGFARRQGTGIGLISKYAALYLKSYFHDTLHPENRQVYSIKGTITDEFRKMWGIQDEYEKKSRDSHTHHCIDAIVIACIGKNEFNKMGEFYRDIFNYYEGKREKPVFEKPWPTFTYDLKQLTEELLVVHDTPDNMPKKASRIIDTKKGKKVAKGDCARGSLHQDTYYGAIERDGSIRYVVRKPLSSFTSIKDLDNIVDDAVRQTILNAVEGKDFKKAIAEPIFMNKDKGVLVKKVRCYAPTVTKPLQIRERKRRDLSGKEYKRPFYVVNDENYMMAIYEGGKMQMITALDAVNFYKESTDRIAYPTIVEEVYKGKRLKYLVRKGTQILMQEKDEEYISTTNQKELFKRLFTITKLEKDGRLTLRHSAEARPATEVKKYLSAEPFMIKDAPRPIIHVSLSKFKFLVEGVDFQITPTGEIILKH

SEQ ID NO: 8880 - protein, 1018 aa, synthetic construct
  REGION 1..1018: note = Synthetic
LYQAGDKIRGHYTARNEHYLKEFQAICDKQSLGTDLCKRLNNAIFYQRPLKSQKGNIGRCTFELGKQRCSTSHPAYEEYRMLCFINNIRLHRQGEDSDFRVLTKEEVDAIIPKFVCKSQFKFEKLAKVLAHKKENYGFKYDSDESTLKFNYRKETSIAGSPVTAGLKEIFGEEWKSEICSVYMKSEGKTEDRINDDVWHVLYSFDNDENIRDWAKKNLQLDDEQAEKFAKIKIERDYASLSLNAIRKILPYLRRGLRYDEAVFCANIPAAFGNVEDVDEYRKIEDDVVACVRNFKSCEVAGRKNTLEKEVAELLEEKYGVDKRHLGKIYHPSKTETYPTAQPDNNGLRLLGSPRTASVRNPMAMRALFRLRALTNELLKKGEINSETVVNIEFARGLNDANMRKAIENYQREIADRHQKYAKEIKDCYLKETGKNIEPTENEILKYQLWEEQNHQCLYTGKMISVSDFIGANPKFDIEHTLPRAAGGDDSQVNKTLCDSRFNREVKKAHLPSELANHAEILLKAKNLWQKKIYELTKQIEGTKGYAADKNTKDGKIQRRHLLKMKRDYYIGKLQRFEMKEVPTGFSNRQGVDIGIIGKYAKSYLHTVFDKIFVVKGATTAAFRKVWGLQSVYEKKERINHVHHCVDAITIACIGKKQYDDWKCYQEAEDMYYRGETGRPSMDKPWSTFTEDVKQLTEGLLIHHYVPDNAGKASKKKLRVRGRIQRNAEGRALYATGDCARLSLHQQTFYGAIKQDDEIRYVVRKPLDSLEKKDIEKIVDPEVRQKVKEAVDAKGMKDAVADGIWMNEEKRIPIKKVRIYTSIANPLRLKRQRDLSVHDYKRDYYVANDGNYCMGIYEGTDAKGKKKKTFKIVNNMDAANYFKARQRGEDVELLPMSDGNDFPLKCVLKTGSVVLFYQDTPKELKECSKKELAKRLYRVVGMSEMKIKQKTGKIDCYGMLSLTFHQEARPSSDLKDKNGVWRIGEDVRPKIKLTHNQTNFLVEGIDFRLTLSGDVEWLK

SEQ ID NO: 8881 - protein, 1217 aa, synthetic construct
  REGION 1..1217: note = Synthetic
MMKKRILGLDTGTNSLGWAVVDREENGQYTLVDKGVVIFQEGVKIEKGIESSRAAERTGHRALRRQYFRRRLRKIKVLKTLVKYNLCPALTEDDLELWKLRKIYPKKDEFMAWQRTNDNEDINPYHCRYICLNEVLDLDRQQDRYTLGRAFYHMAQRRGFLSNRLDQTDEKETGKVKADIKTLSKEIEDSGCKYLGEYFYILYKEKGNTVRIRTRYTDREQHYKKEFFAICEKQKLPKEMVEEVARALFFQRPLKSQRQSVGKCTFEKGKPRCSDSHPLYEEYRMLSFLNSIRIQGPWDVNGYRPLNDEELKRIESLFYRKSKPNFDFEEIAKKIAGKNQYQWKDDTKVNMPYKFNFRMSQGVPGCPTIAQLKEVFGEEWKEGIAETYTLSTKKDGTQKSIDELVNDIWNVLFSFDSKDKVKEFGVKHLQLDEEQAKKFSEIRLSRGYASLSLKAIRNILPFLQMGMIYSDAVFFAKIPTIIGQSLWAERQNVIKEDLAYAIQMAMKEKRRIDEAVKDYLLDNFDLKPGATELLYHPSMIETYPDAKPNKDGIVLLGSPRTNAVKNPMAMRSLHEVRKVVNSLIKEGKIGPDTEVHIEYARELNNANMRTAINDWQKEQERNHNQYAEEISKLYKEATGKDIQPTDLDILKYQLWEEQGHICLYTGKKIGIADFIGAGPMFDIEHTIPQSVGGDSTQENMTLCSSHYNRYVKKAKLPTELAEYESIMTRIEPWKEHFEELSKQIDHISTRGIWDKATKDAKIRKKNRLLLEKKYWQGKYNRFKMTEVPEGFALRQGAGIGIISKYAALYLKSYFHDSLHPERRQVYSIKGALTKEFRTMWGIQLEHEKKSRDNHTHHCIDAIVVACIGKNEISKMGEFFHTEERYKMGEGQRPPQFEKPWPTFTQDLKQITEELLVVHDTPDNMPKRASRKIEISGGRRVVAKGDCARGSLHQDTYYGAIERDGEIKYVVRKPLSSFTNIKDLDNIVDDAVRQTVLNAVEGKDFKKAIAEPIYMNEAKGILIKKVRCYTPTVTQPLDIRRQRDVSRKEYKQQFHVMNDENYMMAIYQGIVKGKRKTKFALVNAMDAAKFYKRSTDRNDYPSLVPEDKDGLPLKWCVRKGTQLIMLEEDEESVSLANEEEMSNRMFTITKMDKVGRLTCRNSKEARTAGDLKSFVNANPFKLKDGYRPILCMSPINFHFLVEGYDFTISPLGEIKLKH

SEQ ID NO: 8882 - protein, 1255 aa, synthetic construct
  REGION 1..1255: note = Synthetic
VIRCRTLTCQIYEKNLAIAKFYLILLQTDTDMTKILGLDLGTASIGWALVERNDTEYALLDQGVDIFQEGVAREKNSEKPAVQDRTAARALRRHYARRRLRKIDLLRVLVRHDLCPALTDEQLKDWKQKKIYPLTDEFIRWQRTDDRTDKNPYRDRYKALTETLDLDTQRDRYTLGRALYHLAQRRGFLSNRKDAGDESESGKVRQSIEGLTADMEKAGCSYLGEYFYRLYARKEKIRTKYTSRNEHYLAEFRAICEKQRLADDLRKALHRAIFYQRPLKSQKGSVGRCTFEKDKSRCPASHPRFEEFRMLSFVNNIRITTPDDPEPRPLSRQEAETILPLFTRKTKPHFDFEEIAKKLAGKGRYACQGDRGEAPYRFNFARTATVTGCPVTASLIALFGDDYLTKICDLYTLGAGKTREQILGDVWHALFSFDDEERLSAWAKQKLRLSDDEAGRFAAIRLPQDYAALSLHAINKILPYLREGYRYDEAVFVANLKAVLPPDIYSDESERNAIEADIAALITDFRQNPLNRGTTKEQCVRDYLRNCRGIDEKRLGRLYHPSMIEIYQTAQPDAQGILQLGSPRTPAVRNPMAMRALFRLRVLVNRLLRDGKIDRETKIHIEFARGLNDANRRKAIELYQRDREAERKAYADEIRRQYASESGREIEPTDDDILKYRLWKEQNHICPYTGKRIGLSDFMGDSARFDIEHTVPRARGGDNSQMNKTLCENRFNRELKRDKLPSELPNHADVMARIDELGWPKEIASLQKQIEIQRRKSKSATTKSEKDGAIQRRHVLQMRLDYWRGKYERFTMTEVPDGFSNRQGVDIGIIGKYARLYLKTVFERIYAVKGTTTAEFRRMWGLQEEYARKERVNHTHHCLDAIVIACIGRNEYDRWAQYAGDEERYRRGEGAKPRFEKPWPTFTEDLEAVADRLLVAHHTPDNMPKQSRKRLRIRGRIRTGRNGETLYAQGDTARGALHQQTFYGAIERQGEVRYVVRKPLGQLQPSDVDNIVDDAVRQKVKEAIDAVGFKTAMDTESHPIWMNEQKRVPIRKVRIFVGKNISPKPLGGKKHRDLSALPHKRPVYVSYGSNYCMAIYEGKDNQGKLKRTFEIVSTLEAAQYFKASADKAARPDLVPQSDEKGFPLKCILKTGTMVLFYEETPEELYDCTQQELAKRLYKLTKFSSMTTGNNSYGLCTFRHHREARPAGELKPKGGAWKAGEAYRPLISLYHTQLNAYVEGFDFELSVTGTVRFKHE

SEQ ID NO: 8883 - protein, 899 aa, synthetic construct
  REGION 1..899: note = Synthetic
LPAGSPARGNTPAGRSASKPLTASISPARPPCCPVTASLMDIFGKEWLREIRSLYLLGDGKTEEQVLNDIWHALFSFKDEERLRDWACEKLQLSEEQAKAFAAIKLPQDYAAMSLNAINKILPYLRCGYRYDEAVFLANLRAALPKEVYADEDRRHNIEQEIASLLLDYKRNPYDKFDSKERRIANYFSDHGLDMSRLDRLYHPSKIETYPDAKPNAEGIMQLGSPRTSAIRNPMAMRALFRLRDLINTLLREGRIDRDTKIRIEFARGLNDANRRKAIEQYQREREAENRKFAEEIRRQYTAKTGREIEPSDDEVLKYRLWEEQQHICPYTGRQIRISDFIGANPGFDIEHTLPRAHGGDDSQMNKTLCENRFNRETKRVKLPAELSNHAEIMERIESFGWREKVESLQKQIEAQVRRSKGAATKPEKDSAIQRRHYLQMQLDYWRGKCERFTMTEIPEGFSNRQEVDIGIIGKYARLYLKTVFDRIYTVKGSTTAAFRKMWGLQEEYTRKERVNHVHHCIDAITIACIGRREYDRWAQYTADEERFNYGETDKPRFEKPWPTFTEDVKAVADELLVAHHTPDNMAKQTRKKLRVRGRVKLSADGKPIYQQGDTARCRLHQETFYGAIKREDEIRYVVRKSIKLLQPSDIDKIVDDAVRNRVRMAIDEVGFKTAINPDEYTIWMNREKGIPIRKVRIFTPGVTQPIALKKQRDLSDKEYKQDYHVANDGNYCMAVYEGKDKKGKLKRSFELVSNLEAAQYFKASADREAGPDLVPQADANGFPLKCILKAGTLVLFYENSPAELCDCTPKELTKRLYKVTGFSTLTVSNNSYGRLALKHHQEARPAGELKAKSGVWKTNEEYRPVISILHTQLNAYVEGYDFELTVTGEIKFKHGRPC

SEQ ID NO: 8884 - protein, 1217 aa, synthetic construct
  REGION 1..1217: note = Synthetic
MTKKRILGLDTGTNSLGWAIVDREENGQYSLIDKGVIIFQEGVKIEKGIESSKAAERTGHRALRRQYFRRRLRKIEVLRVLVKYNLCPALDEEDLKSWKLRKIYPKKDDFMLWQRTSDNDDINPYHCRYICLNDVLNLNKEQDRYTLGRAFYHMAQRRGFLSNRLDTTEEQENSTVKGGIADLNKEIKDSGCIYLGEYFYKLYKEKGNTVRIRTRYTDREEHYKKEFFAICEKQNLPTQMVEELTRALYFQRPLKSQRQNVGKCTFEKGKPRCSDSHPMYEEYRMLSFLNNVRIQGPWDVNGYRPLNEEELKKIEPLFYRKSKPNFDFEDIAKKIAGPRQYQWKGETMLDLPYKFNYRMSQGVSGCPTIAQLREVFGDDWKQNIAETYTLNTKKDGSQKSIDDMVNDVWNVLFSFDSKDKVSEFGKIHLQLDEEQAEKFSKIRLSRDYASLSLKAIRNILPFLQMGMLYSHAVFMANIPKIVGPAIWNDEKQRNHIIDEICKMAADAPIEKEKGLHQTLDICIKDLLSKEYGIKEEKLECMYHPSMIETYPDARPNKDGVVLLGSPRTNAIKNPMAMRSLHEVRKVVNTLIKEGKIGPDTEVHVEYARELNNANMRAAINDLQRENDKKHKQFADEIRTLYKEETGKDIEPTETDILKYQLWEEQEHFCIYTGKKIGITDFIGAGPKFDIEHTIPQSVGGDSTQENMTLCDNHYNRFVKKAQIPTSLPEHEEIMTRIEPWKKRIDDLTKQIDQIRTRYVWDKTTKDARIRRKNRLKLELKYWKGKYNRFTMTEVPEGFARRQGTGIGLISKYAALYLKSYFHDTLHPENRQVYSIKGTITDEFRKMWGIQDEYEKKSRDSHTHHCIDAIVIACIGKNEFNKMGEFYRDIFNYYEGKREKPVFEKPWPTFTYDLKQLTEELLVVHDTPDNMPKKASRIIDTKKGKKVAKGDCARGSLHQDTYYGAIERDGSIRYVVRKPLSSFTSIKDLDNIVDDAVRQTILNAVEGKDFKKAIAEPIFMNKDKGVLVKKVRCYAPTVTKPLQIRERKRRDLSGKEYKRPFYVVNDENYMMAIYEGGKMQMITALDAVNFYKESTDRIAYPTIVEEVYKGKRLKYLVRKGTQILMQEKDEEYISTTNQKELFKRLFTITKLEKDGRLTLRHSAEARPATEVKKYLSAEPFMIKDAPRPIIHVSLSKFKFLVEGVDFQITPTGEIILKH

SEQ ID NO: 8885 - protein, 1260 aa, synthetic construct
  REGION 1..1260: note = Synthetic
MPNFWSIFTENLQTYLMKTRILGLDTGTNSLGWAVVDRDENNQYTPICRGDLIFTEGVKQEKGIEFSLAAERTSYRASRRHYFRRRLRKVEVLKVLVKHKLCPPLSDEALNRWHTKKEYPLDEDFILWQRTSEADNKNPYHDRHICLHRKLNLKDSQTDRYTLGRALYHLTQRRGFKSNRLDTKEEEKKEEKAGSNKKIDVKKAISDLSEEMKKAGCTFLGDYFYLLYRTEGNRVRIRSRYTDREKHYLEEFKEICRVQELDEDLAKALEKTIFFQRPLKSQRQGVGKCTLEKDQRRCVLFHPLYEEYRMLCYLNNIRIKTPSNDRLRPLNKEEREKITPLFYKEKNFDFEKIAEKLAGKTPFGYVKDEEDWPYQFNYRMKQGAPACPTTAMLIKVFGKDWKAGMAETYTMNIKRDGTLKTEDEVCADILNVLGSFDSKEKLKEFALQKLQLNEARAKTFSSFKPAKGYATLSIKAIRKILFFLRTGNYYSKAIFLANIPTIVGEKVWNDIKIRSRLLDNIEAALRPEDDDNEENEAFISKEEKYEIKNNKAAERIKAAIIAEMPSAPVELLYHPSMIEAYPDAMRNKRFDCYQLGSPKTNAVRNPMAMRSLHMVRKVVNHLLRKHIIDEKTEIHIEYARELNDANKRQAIVKWQDKLRDLHTAYAKSIKQLYKAETGLEIEPTKTDILKYQLWEEQQHVCLYTGKKIGIADFLGANPKFDIEHTIPRSRGGDSTQENLTLCDSKFNRDIKRDKLPTELDNYEEILARIEHWKKQCYALRKAQDEIRIHAGLEKGKKDTKIQYRHLKRLEYGYKNGKYDRFTMKEVPEGFSRRQGAGIGLISKYAGLFLKSLFKDPKNPNRSNVYVVKGAITAEFRKLWGLQQVDEAKSRENHTHHCIDAYTIACIGPCEYAALAAYYRSDEEFKYGRRREKPQFEKPWPTFTEDLLKLQEELLIVHQTTDKLGKRDRRKVKTPRGKFLTGGDSARGRLHQETYYGAINYDGKIKYVVRKPLDSLTEKDLDKIVDETVKGIVKGTVEAKGSLKEALADGIYMNKEKGILIKRVRIFTPLAEPLALRSLRDQSRKEHKRQVYVTNKGNYMMGIYEGLVKGKQKREIELINNIEAAEFFRKRNNRAQGLPLLPEKSASDFPLKHTLKIGTLVLLYETSPSEIDFSDPKNVAKRLYKVVGMNYHDGKGSAGLISLRYHQEARPAKELCFKKGAYKNGEVFRPAIILRHTQFNALVEGQDFDLDITGKITLKRP

SEQ ID NO: 8886 - protein, 703 aa, synthetic construct
  REGION 1..703: note = Synthetic
LDASRLIRLYHPSKIETYPDAQPKANGILQLGSPRTATIRNPMAMRALFRLRNLINTLLREGRIDRDTKIRIEFARGLNDANRRKAIEQYQREREVENRKYAEEIHSQYAAETGREIKPSDDEVLKYRLWEEQQHVCPYTGRQIRISDFVGSAPDFDIEHTLPQARGGDDSQMNKTLCENRFNRETKRAKLPAELSNHVEIMERIESFGWREKMESLQKQIEAQVRRSKSAAIKSEKDDAIQRRHYLQMQLDYWRGKYERFTMAEIPEGFSNRQGVDIGIIGKYARLYLKTVFDRIYTVKGSTTAAFRKMWGLQEEYARKERTNHVHHCIDAITIACIGRREYDRWAQYVADEERYGYGESGKPRFEKPWPTFTEDVKAAADELLVAHHTPDNMTKQTRRKLRVRGLIKLNADGEPIYQQGDTARCRLHQDTFYGAIKQDGEIRYVIRKSLAQLQPTDIDKIIDDAVRDRVREAIDEVGFKTAMNPDEYTIWMNREKGIPIRKVRIFTPSVKHPIALKKQRDLSAKEYKRDYHVVNEGNYCTVIYEGQDKKGKTKRTFELVSNLEAAQYFKASADREARPDLVPQTDTNGFPLKYILKTGTMVLFYENTPAELYECTRKELVKRLYKVTAMAAEGRVQFLFHQEARDQKTLTSLYGAGTSQFCQSNPSPKLRLSVSNFNMLVEGYDFELTVTGEIKFKDDRPC

SEQ ID NO: 8887 - protein, 995 aa, synthetic construct
  REGION 1..995: note = Synthetic
MTKVLGLDLGTNSLGWALVDESENGYALLDKGVAIFQEGVARDKNNEKPAVQDRTDARALRRHYFRRRLRKIDLLRVLVRYDLCPPLTDEQLSTWRQKKQYPLDEEFLRWQRTDDNEDRNPYHDRYVALTERLDLENRAQRWLLGRAFYHLAQRRGFLSNRKEAGNEKEDGTVKESIKNLSAEMEAAGCRYLGEYFYGLYQHKERIRGKYTSRNEHYLTEFNAICDRQQLPDKWRRALHRAIFFQRELKSQKGSVGRCTFEPTKSRCPVSHPRFEEFRMWSFINNIRVTGPDDGTPRPLTPKEIETIRPLFFRKSKSYFDFEEIARRIAGKGKYACREERIEAPYRFNFARTATVSGCPVTASLMDIFGKEWLREIRSLYLLGDGKTEEQVLNDIWHALFSFKDEERLRDWACEKLQLSEEQAKAFAAIKLPQDYAAMSLNAINKILPYLRCGYRYDEAVFLANLRAALPKEVYADEDRRHNIEQEIASLLLDYKRNPYDKFDSKERRIANYFSDHGLDMSRLDRLYHPSKIETYPDAKPNAEGIMQLGSPRTSAIRNPMAMRALFRLRDLINTLLREGRIDRDTKIRIEFARGLNDANRRKAIEQYQREREAENRKFAEEIRRQYTAETGREIEPSDDEVLKYRLWEEQQHICPYTGRQIRISDFIGANPGFDIEHTLPRALGGDDSQMNKTLCENRFNRETKRAKLPAELSNHAEIMERIESFGWREKVESLQKQIEAQVRRSKGAATKPEKDSAIQRHHYLQMQLDYWRGKCERFTMTEIPEGFSNRQGVDIGIIGKYARLYLKTVFDRIYTVKGSTTAAFRKMWGLQEEYTRKERVNHIHHCIDAITIACIGRREYDRWAQYAADEERFNYGETDKPRFEKPWPTFTEDVKAVADELLVAHHTPDNMAKQTRKKLRVRGRVKLSADGKPIYQQGDTARCRLHQETFYGAIKREDEIRYVVRKSIKLLQPSDIDKIVDDAVRDRVRMAIDEV

SEQ ID NO: 8888 - protein, 688 aa, synthetic construct
  REGION 1..688: note = Synthetic
LYTLGAGKNEEQILNDVWHVLFAFEDEERLQAWLQEKLQLSADDAKTLAAFRLPQGYASLSLNVINKILPYLRRGYRYDEAVFFANLGKVLPAEVYADPARRREVEQGISAQMDDLGDGEKTRKEERIRDYLRRYWGVEEKRLERLYHPSMIEAYPSASPNGQGLLQLGSPRIPAVRNPMAMRALFRLRVLLNELLREGKIDRGTKINIELARELNDANKRKAIERYQREREAENRKYAEEIRQQYVEATGHSIEPSEEDILKYRLWVEQGHCSLYTGKTIGISEFLGDGRRYDIEHTVPRSRGGEDAQYNKTLCEEEFNRDIKRDKLPSELANHTAILACVESCGWFERIEGLEHRVWGADRRAKSATTKSAKDFAIQDRHYWRMHLDYWRRKCEAFTMTEVPEGFSNRQGVDVGIIGRYARLYLQTVFDRVYTVKGATTAAFRRMWGLQEEYAAKERVNHVHHCIDAITIACIGSREYALWAQYVRQDELYRRGEADKPRCGKPWPTFTEDVRATADELLISHHTPDNMPKQSRKRLRVRGKVQRNDRGEVKYMQGDTARGALHQQTFYGAIERDGEIRYVVRKSLDQLLPADVEKIVDEAVRQKSGRLSRIRFQRGDRPDETHRLDERGKTDTDSEGADIDRCEKSDSPKASCDVSVKEYKRYYHVSTTGITAWRFTKAETGRAG

SEQ ID NO: 8889 - protein, 779 aa, synthetic construct
  REGION 1..779: note = Synthetic
LSLNAIRKILPYLRRGLRYDEAVFCANIPAALGNVEDVDEYRKIEDDIVACVRNFKSCEVAGRKNTLEKEVAELLEEKYGVDKRHLGKIYHPSKTETYPIAQPDNNGLRLLGSPRTASVRNPMAMRALFRLRALTNELLKKGEINSETVVNIEFARGLNDANMRKAIENYQREIADRHQKYAKEIKDCYLKETGKNIEPTENEILKYQLWEEQNHQCLYTGKMISVADFIGANPKFDIEHTLPRAAGGDDSQVNKTLCDSRFNREVKKAHLPSELANHAEILLKAKNLWQKKIYELTKQIEGTKGYAADKNAKDGKIQRRHLLKMKRDYYIGKLQRFEMKEVPAGFSNRQGVDIGIIGKYAKLYLHTVFDKIFVVKGATTAAFRKVWGLQSVYEKKERINHVHHCVDAITIACIGKKQYDDWKCYQEAEDMYYRGETGRPSMDKPWSTFTEDVKQLTEGLLIHHYVPDNAGKASKKKLRVRGRIQRNAEGRALYATGDCARLSLHQQTFYGAIKQDDEIRYVVRKPLDSLEKKDIEKIVDPEVRQKVKEAVDAKGMKEAVADGIWMNEEKRIPIKKVRIYTSIANPLRLKRQRDLSVHDYKRDYYVANDGNYCMGIYEGTDAKGKKKKTFKIVNNMDAANYFKARQRGEDVELLPMSDGNDFPLKCVLKTGSVVLFYQDTPKELKECSKKELAKRLYRVVGMSEMRITRKKGKIDCYGMLSLTFHQEARPSIDLKDKNGEWRIGEDVRPKIKLTHNQTNFLVEGIDFRLTLSGDVEWLK

SEQ ID NO: 8890 - protein, 642 aa, synthetic construct
  REGION 1..642: note = Synthetic
LLKKGEINSETVVNIEFARGLNDANMRKAIENYQREIADRHQKYAKEIKDCYLKETGKNIEPTENEILKYQLWEEQNHQCLYTGKMISVADFIGANPKFDIEHTLPRAAGGDDSQVNKTLCDSRFNREVKKAHLPSELANHAEILLKAKNLWQKKIYELTKQIEGTKGYAADKNAKDGKIQRRHLLKMKRDYYIGKLQRFEMKEVPTGFSNRQGVDIGIIGKYAKLYLHTVFDKIFVVKGATTAAFRKVWGLQSVYEKKERINHVHHCVDAITIACIGKKQYDDWKCYQEAEDMYYRGETGRPSMDKPWSTFTEDVKQLTEGLLIHHYVPDNAGKASKKKLRVRGRIQRNAEGRVLYATGDCARLSLHQQTFYGAIKQDDEIRYVVRKPLDSLEKKDIEKIVDPEVRQKVKEAVDAKGMKDAVADGIWMNEEKRIPIKKVRIYTSIANPLRLKRQRDLSVHDYKRDYYVANDGNYCMGIYEGTDAKGKKKKTFKIVNNMDAANYFKARQRGEDVELLPMSDGNDFPLKCVLKTGSVVLFYQDTPKELKECSKKELAKRLYRVVGMSEMRITRKKGKIDCYGMLSLTFHQEARPSIDLKDKNGEWRIGEDVRPKIKLTHNQTNFLVEGIDFRLTLSGDVEWLK

SEQ ID NO: 8891 - protein, 703 aa, synthetic construct
  REGION 1..703: note = Synthetic
VGKAETAPLRRRGRTLRRLPQDYAALSLHAINKILPYLREGYRYDEAVFVANLKAVLPSDIYSDESERSAIEADITALITDFRRNPLNRGTTKEQCVRDYLRNCRGIDEKRLGRLYHPSMIEIYQTAQPDAQGVLQLGSPRTPAVRNPMAMRALFRLRVLVNRLLRDGKIDRETKIHIEFARGLNDANRRKAIELYQRDREAERKAYADEIRRQYASESGREIEPTDDDILKYRLWKEQNHICPYTGKQIGLSDFMGDSARFDIEHTVPRARGGDNSQMNKTLCESRFNRELKRDKLPSELPNHADVMARIEELGWPEKIAGLQKQIEIQRRKSKSATTKSEKDGAIQRRHVLQMQLDYWRGKYERFTMTEVPDGFSNRQGVDIGIIGKYARLYLKTVFERICTVKGATTAEFRRMWGLQEEYARKERVNHTHHCLDAIVIACIGRNEYDRWAQYAGDEERYRRGEGAKPRFEKPWPTFTEDLEAVADRLLVAHHTPDNMPKQSRKRLRIRGRIRTGRNGETLYAQGDTARGALHQQTFYGAIERQGEVRYVVRKPLGQLQLADVDNIVDDAVRQKVKEAIDAVGFKTAMDTESHPIWMNEQKRVPIRKVRIFAGKNISPKSLGGKKHRDLSALPHKRPVYVSYGSNYCMAVYEGEDKRGKLKRTFEIVSTLEAAQYFKASADKAARPDLVPHLKYINWEQSY

SEQ ID NO: 8892 - protein, 856 aa, synthetic construct
  REGION 1..856: note = Synthetic
LSHNCTIKVFGEDWKAALAETYTMRTKQDGTLKTEDEICTDIWNVLYSFSSKEKLKEFGLKKLQLDEAQAKAFSEIRLTRDFASLSLKAIRKILFFLRTGEDYSKAIFLANIPTIVGEEIWSNIERRSRLLYEVDVALHPQEEDEAEEHRTIAERIKKAVAEEVPDTPIDLLYHPSMIEAYPDAKRNERFDCYQLGSPKTNAVRNPMAMRSLHMVRKVINHLLRKHIIDEKTEIHIEYARELNDANKRQAIADWQRELSKRHTAYAQNIRQLYKAETGLEIEPTKTDILKYQLWEEQQHVCLYTGKKIGIADFLGANPKFDIEHTIPRSRGGDSTQENLTLCDSKFNRDIKRDKLPTELANYEEILARIEHWKKQCYALKLKRDGIRTHSGLEKSIKDSKIRRRHLVGLEYGYLKGKYDRFTMKEVPEGFSRRQGAGIGLISKYAGLFLKSLFKDPKNPNRSNVYVVKGAITAEFRKLWGLQQADEAKSRENHTHHCIDAYTIACIGPCEYAALAAYYRSDEEFKYGRRREKPQFEKPWPTFTEDLLKLQEELLIVHQTTDKLGKRDRRKVKTPRGKFLTGGDSARGRLHQETYYGAINYDGNIKYVVRKPLDSLTEKDLDKIVDETVKGIVKGAVEAKGSLKEALADGIYMNKEKGILIKRVRIFSDVSEPINLKQLRDVSTKEYKRHIHLRKDENYLFAIYEGIDKKKKNKKQTETATVDYLDAAKFYKDSKRRDKANSLVGDYSKKNKLPLKCILKKRQMVLFYEHSPEEIRFKDKKDLSKRLYIVTSIAKDGRVKFLHHQAATATGIQSSPIPFTNDGEHQPYYRLSASNIKVLVAGIDFDINILGEITPKL

SEQ ID NO: 8893 - protein, 722 aa, synthetic construct
  REGION 1..722: note = Synthetic
LPAGSPARGNTPAGRSASKPLTASISPARPPCRVVPSRLRSWTFSGRSGFGKSAVSICSAMGKPRNRWLNDIWHALFSFKDEERLRDWACEKLQLSEEQAKAFAAIKLPQDYAAMSLNAINKILPYLRCGYRYDEAVFLANLRAALPKEVYADENRRHNIEQEIASLLLDYKRNPYDKFDSKERRIADYFSDHGLDMSRLDRLYHPSKIETYPDAKPNAEGIMQLGSPRTSAIRNPMAMRALFRLRNLINTLLREGRIDRDTKIRIEFARGLNDANRRKAIEQYQREREAENRKFAEEIRRQYTAETGREMEPSDDEVLKYRLWEEQQHICPYTGRQIRISDFIGANPGFDIEHTLPRALGGDDSQMNKTLCENRFNRETKRAKLPAELSNHAEIMERIESFGWREKVESLQKQIEAQVRRSKGAATKPEKDSAIQRRHYLQMQLDYWRGKYERFTMTEIPEGFSNRQGVDIGIIGKYARLYLKTVFDRIYTVKGSTTAAFRKMWGLQEEYIRKERVNHIHHCIDAITIACIGRREYDRWAQYAGDEERFNYGESDKPRFEKPWPTFTEDVKAVADELLVAHHTPDNMTKQTRKKLRVRGRVKLSADGKPIYQQGDTARCRLHQETFYGAIKREDEIRYVVRKSIKLLQPTDIDKIVDDAVRDRVRMAIDEVGFKTAINPDEYTIWMNREKGIPIRKVRIFTPGVHPADCTKKTARSLRQRV

SEQ ID NO: 8894 - protein, 724 aa, synthetic construct
  REGION 1..724: note = Synthetic
MENVGELVFNYQPKHRDVQGTIEMLIKDFLANNFELPAGATDKLYHPSMIETYPNAQRNEFGILQLGSPRTNAIRNPMAMRSLHILRRVVNQLLKENIIDENTEVHVEYARELNDANKRKAIADRQKEQDKQHKKYVDEIRKLYKEETGKEIEPTQTDVLKFQLWEEQNHHCLYTGEQIGITDFIGSNPKFDIEHTIPQSVGGDSTQMNLTLCDNRFNREVKKAKLPTELANHEEILTRIEPWKNKYEQLVKERDKQRTFAGMDKAVKDIRIQKRHKLQMEIDYWRGKYERFTMTEVPEGFSRRQGTGIGLISRYAGLYLKSLFHQADSRNKSNVYVVKGVATAEFRKMWGLQSEYEKKCRDNHSHHCMDAITIACIGKREYDLMAEYYRMEETFRQGRGSKPKFSKPWATFTEDVLNIYKNLLVVHDTPNNMPKHTKKYVQTSKGKVLAQGDTARGSLHLDTYYGAIERDGEIRYVVRRPLSSFTKPEELENIVDETVKRTIKEAIADKNFKQAIAEPIYMNEDKGILIKKVRCFANSVKQPINIRQHRDLSKKEYKQQYHVVNENNYMLAIYEGLVKNKVVREFEIVSYIEAAKYYKRSQDRNIFSSIVPTHSAKYGLPLKTKLLMGQLVLMFEENPDEIQVDNTKDLVKRLYKVVGIEKDGRIKFKYHQEARKEGLPIYSTPYKNNDDYVPIFRQRIKNINILVDGKDFTIDILGKVTLKE

SEQ ID NO: 8895 - protein, 1086 aa, synthetic construct
  REGION 1..1086: note = Synthetic
MDKKLVFAFDVGTASLGLAARRGMEMIEAHTLLLDEEYGKRDELRKVIRAYRTRMAHQARNEYLDNLCREVGIPVLEGRKEEQKGDPRLEREFPRKDDPTQYNSYILRIMLLRGEKLEPWQVYKALHSAIQRRGFDSNVPWKNRPSQMKETDDDKDSKTAARAQKYEDDLQEAVGSNLNYHYPAYYSAYRMGLWDPKTDRINSRITHTAGGVRNEIIPRKLVEKELLALLRNAARQFPLLKGKELTVLYGPAGKAYASFYPELRREHSLKEGGENDWQGVLGQKIPRFDNRLPAACALIPRFHVARSADIAVYEATFLMKLKNMRFYRTDEAGRIQKESSLSAKEIGALLKNAREKADEIRKEAGPKEAIVKIAKAYSLNKTDWKNWLKKYADRFPATAPVPETLFQPALLNLAGQKESPAKIPVGKEENRPLPSNPLVEAPSVSGRSRYSRPAARLIRELILSGKSGEDFYKKNSGLCGQTGTLFEKFKKEDLDFLKQIKGPWDNIYIPTMPLSGDWNAIHVREEELDEKIEKLIGAQRNVLVAHRIRLFNEQLRRMIKAHGKPDQIAIEFIREDFLGEEAKKKLIKIQKDNRNAWEHTRQQAAENNIQGGGNIRKMRLLREQVNVCPYTGETLSLSEIDELEIEHIVPRARGGSDNRCNMVVTRSATNREKGDLTPYEWLTRKGTFKEYCERVNEMEGLSKKKKILLTAEDPLKFDEKWDSLAETAYIARLARDVASMRCGWQPGEAGERKLVQVINGSLTARVRAINKLNSLLADGADKLDPDKLMKKVRSNDKHHALDAMVLSFIPEWARNPNLKKNYNLPPGIDREYFKKCVAQVVPYNCILTQSALQETFYGTRLLPDESGKIQETVVTRLKISELGVSLNKFDQNKARKEADNILDPVLRAPIAEALENKSFDKESWAAWCENFRHPKSGSRVLKVRARAQKWKKSEYINVAKEREAKGFRGQYRTAQYHQGYLIYLEKDKKGVEKPAVWPIYAWQSRKKEEEKLKAKNCHVIDFFQAGCLIELLCDYEHGEIIVQPGKYILRTIRKDGWFVLDRVQGVLPLSKIENIRENFRRVRKYP

SEQ ID NO: 8896 - RNA, 41 nt, synthetic construct
  variation 1..20: note = note, n is a, c, g, or t
  source 1..41: mol_type = other RNA
  misc_feature 1..41: note = Synthetic
nnnnnnnnnnnnnnnnnnnngttggatcaggacgtcattct

SEQ ID NO: 8897 - RNA, 178 nt, synthetic construct
  misc_feature 1..178: note = Synthetic
  source 1..178: mol_type = other RNA
ttgcaaaaaatgatgtcctgatccaataaggggcgcagcccccgcaccatttttccccgatctacggatcggatcggcgctgccttcgaaaagccgacatggaaaacccccagtttatcggggacgatgtaaacctgagtcgccacggcgctcctcccgctctacggaccgggcttcg

SEQ ID NO: 8898 - RNA, 225 nt, synthetic construct
  misc_feature 1..225: note = Synthetic
  source 1..225: mol_type = other RNA
  variation 1..20: note = note, n is a, c, g, or t
nnnnnnnnnnnnnnnnnnnngttggatcaggacgtcattctaaaattgcaaaaaatgatgtcctgatccaataaggggcgcagcccccgcaccatttttccccgatctacggatcggatcggcgctgccttcgaaaagccgacatggaaaacccccagtttatcggggacgatgtaaacctgagtcgccacggcgctcatcgcccgctctacggaccgggcttcg

SEQ ID NO: 8899 - protein, 672 aa, synthetic construct
  REGION 1..672: note = Synthetic
MNTETREQVLGIDFGPKHVGIALVARGASSEEVLFVAEVRLRDRKSLLADRRALRRGRRGRKRYRQPKIPQRGGGATSQSGEESERGRAAAPEYRRATGLNTGRRRCKFVDPQTGEICGWNTPRKANVRDLLLWNICRHLPVSVSEQAGFLAYVNQTNLHRAEILGALPAEEQAPLEAVFSQQRRPKDERLKDRLRRLGVDRHLRSQVTDIVGITSRRPLSGRLSFCREHFLRHHEQSRVPRPSVWLPNTVEMKQADVLKVCRQEVAPRWRVDCIVLERANFDLQLLRQQTAIEWSVEDWQRGPRWGYRNTFEAKKQEQGNRCAYCGSKPTAKNRLRLELEHVIPGGGDTWENLVLSCRKCNEGKGNRSPAQAGMRFWTDTETGETLSPAPLGAAHVSRYMTQTDQGWRRLQAALQQVFPQAAVEHTWGYVTSFYRNRWNLPKKHFVDAAVIASSHELERPVSVPEQPQRFAPTSGGKQLFDTNPLSKRPEGRFAQSKAIVCEQGTLAFKDVAKVENPRKRATLQRVADEATAAAKARGETPPTAFTAEMLPKIPFKSVRLAKQDASDTNTRRLGRHWFKVASAVNIATIVYQLDGKVCMQLQRNPAVFRHDPGLPQGARVVATFRKGDLVECDAGRGRVTKNHSNCTLTVELLDSGKEVTRLAKSFRPRHG

SEQ ID NO: 8900 - protein, 775 aa, synthetic construct
  REGION 1..775: note = Synthetic
MVVRPQGKLDHIPIPKPERGGITIRSENVLGIDFGPEHVGLALVRREPAGEQVLYAASITLRDLSPVMKERRALRRQRRSESWYRQPRVPQRGGGSARGAGAQEDEQAVEGVPEEEEEDRSRARSAPEYRRAQGCNKPKRKCKYVDPKTGEVCGANTPRKEKVRDLLLWDICQHLPVEPEQRLAILSYVNQVNIVRPEVLACLALEERALLENHRALARASKSKPLPQLLCELKIKKQLQSQILAIASGDPERKAADLKGRMAFCRKHFLLHHQQTRIPKPSAWLPPSIRCRHADLERVCREEVAPRWPVHRIRLERAQFDLQAIQRDPQGRGKDWDPEEWQRGPCWGRRNIYSAKRHEQGNRCAYCGKEPKKENRLELEHVKPGGGNTWDNLVLACRKCNQRKGKAEARGAGLKFSVDPDTGVSLAPRGLGESVVARYMTQTDQGYRELVARLQQLFPDAQIEYRYGYQTDHIRKRWIGSAQFAETALSLGYKQSPPRPKKRRKQWSELAHLKRKPRRHSDPLKSHVMDAVAIAGSLQRDSPPELCQADKITIRPSRRQLFDTNPLGRGSDGRFYQRVKICGTQGGLSFRRVKHVVDARKRAILERVRDLLIEQAKGNEESPPSAFTPDAAQLIPFTSVRLAKRDASKTNTRRLHAPDDDRLPQQKGGHWYKAAGGPNWATVVYRLGGREQVAVLRNPAAFPDASSDIPAGAQVLFSFRKGKLVSFEQDGQTTRARITKNNSDGTLTVERLDDGREVTRSARCFRPVPLLAPNA

SEQ ID NO: 8901 - protein, 700 aa, synthetic construct
  REGION 1..700: note = Synthetic
MIRLGIDYGGKYTGIGVVDTRNNHVLYAKTVRMRSDIPDKYEQRRALRSMRRCRKTKKRRLRDLRKYLDEINLSEVAKKRIYRLSHKRGYDYREYDPEELLEQEENLEARHREEVLQDIRAVLSSENATEEQIKRIEDIINKQYRPERFKNRILTKCKICGKNTPLKRNVRDLLIENILMDLPVTEEQKQFIRNNALTEDGKERLKPFFRRVHINEFLRKQTYDIAEGKLSGRTVFCKDHMLEHHKFTKVPKTTVRVLPSTKVKIDNVVKIIESEILPKYKFQEVVMEANNFDVSAKTRGRSRLKKDEYQKGHVKKEKGLVEVLYKEFKGHCVYCGNKYDVHRMTRDHIYPKKKGGLNIYANLVLACKDCNGKKKGRTPVEWGVMPKIDVVNQLENDLKKKILLDSTQHDSLDFNRYMGQASIGWRHLSDRLRQISGNNLPIRRKSGLVTAHFRKWWGFVKEKGHPVHHALDAVILASHKDTDEVGMVDMTLKPDIEPEKMEKKDYLIEFRAKQDRKSSQLHDQNPVSSKNGIITQRKMVTEIKRGKENRIVNGEYRKKVILLFDKYDIKNGKCPNDKQARELGCKRLKCYVIGTGPSQLAKLKNNHYKVATPNDSVIVAKDNSGNTHVILRKNRYLRKHMQKEQVPDGFIIDKVFRRGDQVADSKGDIFIVKKLGKSLVIANREGVEKTKTPKALKPLN

SEQ ID NO: 8902 - protein, 700 aa, synthetic construct; identical to SEQ ID NO: 8901
  REGION 1..700: note = Synthetic

SEQ ID NO: 8903 - protein, 701 aa, synthetic construct
  REGION 1..701: note = Synthetic
VLTLGIDYGGKYTGLAIVDTRNNNVLYTKTIKMRSDISDKYEQRRALRSTRRARKTKKRRLRDLKKYLDESTLSQAVRKGIYHLAHKRGYDYREYDQEEIVEQEQDRNARHREEVIEDIHKALSSENVSEKLSIRIVDIINKQYRPKRFCNRILTKCKICGKNTPLKKNVRDLLIENILMDLPIAEEQKQFIRDHALQAEGKEILKKFFRKVHINEYSRKQIYDIAEGKLTGRTVFCKDHILEHHEFTKVQKAIVRVLPSTRVKIDNVCKVIKEEILPKYTFHEVVMEANNFDVSAKTKGKKKLPKEEYQKGDVKKSKGLLESLYEEFNGYCVYCGKTFDISRMTHDHIYPKKKNGLNIYANFALACKDCNDKKKGRTPLEWGILPNIEVVNLLENDLKKKILLDSTYHDSLDFNKYMGQTSIGWRYLSQRLKDITGNSDLSIQRQSGLITAHFRKWWGFIKERSNPIHHALDAVILASRKETNDEGMVDMTLKPNIEVDGIEKKDYLIEFRARQDKRSSQLHDQNPVSLKNGLITQYRMVTEIPRGEENRIISDAFKAQLSSLFEKYNIAKGKCLNDEQGKEVGCYRLKCKVTGTGSSQLAKLRNNYYKVATPNDSVVVGRDNSGKSHVILQKNKYLKKHMAQEPIPEAFIIDKVFRRGDQVADQNGELFTIKKLRKSPVIINREGVEKTRSPKLLQKVS

SEQ ID NO: 8904 - protein, 529 aa, synthetic construct
  REGION 1..529: note = Synthetic
MLTLGVDYGGKYTGLAIVDARNNNVLYAKTIKVRSDIPDKYEQRRALRSTRRSRKTKKRRLRDLKKYLDESNLSQAARKEIYHLAHKRGYDYREYDQEEILEQEQDRNARHREEVLDDIRKALSSENISEELSGRIVDIINKQYRSKRFKNRILTKCKICGKNTPLKKNVRDLLIENILMDLPIAEEQKQFIRDHALQAEGKEILKKFFRKVHINEYSRKQIYDIAEGKLTGRAVFCKDHILEHHEFTKVPKTIARVLPSTRVKIDNVCKVIKEEILPKYTFHEVVMEANNFDVSAKTKGKKKLPKEEYQKGDVKKSKGLLESLYEEFKGHCVYCGKTFDISRMTHDHIYPKKKNGLNIYANFALACKDCNDKKKGRTPLEWGILPKIEVVNLLENDLKKKILLDSTYHDILDFNKYMGQTSIGWRYLSQRLKEITGNSDLSIQRQSGLITAHFRKWWGFIKERSNPIHHALDAVILASRKETNEEGRVDMTLKPNIELDGIEKKDYLIEFRARQDKRSSQLHDQNPVS

SEQ ID NO: 8905 - protein, 643 aa, synthetic construct
  REGION 1..643: note = Synthetic
MSYYLKKQLEKEKKEWEETERNSRHRDEVTKDVRKVMSERDATEQQISHVIKIFNKQYRPKRFNNRILTKCKVEDCGVNTPLRKNVRDLLIKNIVRFLPLTQSEKAELEAHALDKEGREKVKTFFRRHRINEFLRKQIYDIAFNQNLSGRTVFCKKHILEHEQHTKEERKVFRLAPSLKTKINNVLSVIKDDILPKLEIKKVVMESNNFDIAARTKGKKRLTKDEYGKGHKEAKESLIEVLLKETKNQCIYCGKVITVTTANTDHIFPRKAGGINVFANLVACCRECNEKKKGRTPLESGILPQPEITAHLENDLKKKILEDARNMNELNLNSIKYMSHASIGWRHMRDRLRGLIGNEELPIERQSGILTAYFRRWWGFRKERGNDMHHALDAVILASKKDYVDDGVDMTLKPKFSDGREFDPEKHLPDTISFKRDKSNKGTPLYDKNPLSIKNNLITRRWMVTEVEHGKEDTIISDEYRMRLKEAFKHFGTSKGKCLTDEEARQAGFYQKKNGNFMSLRCVEKGLGWGQMVKINNNAFKTNVHNIGVAVYLDEKGKKKAYEIKNPRLLNHFCKQPPETEGKKLYTLKRGDYVTHESEDSVYRIKKLGTSPVLEAVVKGSIGRIRNSASATKLTKVSKPQKVF

SEQ ID NO: 8906 - protein, 761 aa, synthetic construct
  REGION 1..761: note = Synthetic
MQKELVLGIDYGGKYTGLAVVDQRNNQVLYARTVKMRDDVADILEGRREQRGIRRTGQTKKKRLRELKAYFKSIGGEYDESIGTFKNEPFMTVYKLCHKRGYDYAEMPKEKTREEIEVMSADLKKQLEKEKKEWEETERNSRHRDEVTKDVRKVMSERDATEQQISHVIKIFNKQYRPKRFNNRILTKCKVEDCGVNTPLRKNVRDLLIKNIVRFLPLTQSEKAELEAHALDKEGREKVKTFFRRHRINEFLRKQIYDIAFNQNLSGRTVFCKKHILEHEQHTKEERKVFRLAPSLKTKINNVLSVIKDDILPKLEIKKVVMESNNFDIAARTKGKKRLTKDEYGKGHKEAKESLIEVLLKETKNQCIYCGKVITVTTANTDHIFPRKAGGINVFANLVACCRECNEKKKGRTPLESGILPQPEITAHLENDLKKKILEDARNMNELNLNSIKYMSHASIGWRHMRDRLRGLIGNEELPIERQSGILTAYFRRWWGFRKERGNDMHHALDAVILASKKDYVDDGVDMTLKPKFSDGREFDPEKHLPDTISFKRDKSNKGTPLYDKNPLSIKNNLITRRWMVTEVEHGKEDTIISDEYRMRLKEAFKHFGTSKGKCLTDEEARQAGFYQKKNGNFMSLRCVEKGLGWGQMVKINNNAFKTNVHNIGVAVYLDEKGKKKAYEIKNPRLLNHFCKQPPETEGKKLYTLKRGDYVTHESEDSVYRIKKLGTSPVLEAVVKGSIGRIRNSASATKLTKVSKPQKVF

SEQ ID NO: 8907 - protein, 498 aa, synthetic construct
  REGION 1..498: note = Synthetic
NDVADILEGRREQRGIRRTGQTKKKRLRELKAYLKSISGEYDESIGTFKNEPFMTVYKLCHKRGYDYAEMPEEKTHDEIEAMSADEKKQWEKEKKEREETQRNSRHRDEVTKDVRKVMSERGATELQISHVIKIFNRQYRPKRFNNRILTKCKVEDCGVNTPLRKNVRDLLIKNIVRFLPLTQPEKAELEAHAIDKEGREKVKTFFRRHRINEFLRKQIYDIAFNQNLSGRTVFCKKHILEHEQHTKEERKVFRLAPSLKTKINNVLSVIKDDILPKLEIKKVVMESNNFDIAARTKGKKRLAKDEYGKGHKEAKESLIEVLLRETKNQCVYCGKVITVTTANTDHIFPRKAGGINVFANLVACCRECNEKKKGRTPLESGVLPQPEITAHLENDLKKKILEDARNMNELNLNSIKYMSYASIGWRHMRDRLRGLIGNEELPIERQSGILTAYFRRWWGFRKERGNDIHHALDAVILASRKDYTDDDIETSILGWKRV

SEQ ID NO: 8908 - protein, 675 aa, synthetic construct
  REGION 1..675: note = Synthetic
QRGIRRTGQTKKKRLRELKTYLKNIGGKYDESIGTFKNEPFMTVYKLCHKRGYDYAEMPEEKTHDEIEAMSADEKKQWEKEKKEREETQRNSRHRDEVTKDVRKVMSERGATELQISHVIKIFNRQYRPKRFNNRILTKCKVEDCGVNTPLRKNVRDLLIKNIVRFLPLTQPEKAELEAHAIDKEGREKVKTFFRRHRINEFLRKQIYDIAFNQNLSGRTVFCKKHILEHEQHTKEERKVFRLAPSLKTKINNVLAVVKDEILPQFGINKVIMESNNFDIAARTKGKKRLAKDEYGKGHKEAKESLIEVLLRETKNQCVYCGKVITVTTANTDHIFPRKAGGINVFANLVACCRECNEKKKGRTPLESGVLPQPEITAHLENDLKKKILEDARNMNELNLNSIKYMSYASIGWRHMRDRLRGLIGNEELPIERQSGILTAYFRRWWGFRKERGNDIHHALDAVILASRKDYTDDGVDMTLKPQSSDGREFDPEKHLPDTISFKRDKSNKGTPLYDKNPLSIKNSLITRRWMVTEIEHGKEDTIISDEYRKKLKEAFKHLGTSKGKCLTDEEARQTGFYQRKNGNLMSLRCVEKGLGWGQMVKINNNAFKTNVHNIGVAVYLDEKGNKKAYEIKNPRLLKHFVEKPPEIKGKKLYTLNRRDYVRYEGEDTIYQITK

SEQ ID NO: 8909 - protein, 726 aa, synthetic construct
  REGION 1..726: note = Synthetic
MRDDVADILEGRREQRGIRRTGQTKKKRLRELKTYLKNIGGKYDESIGTFKNEPFMTVYKLCHKRGYDYAEMPEEKTHDEIEAMSADEKKQWEKEKKEREETQRNSRHRDEVTKDVRKVMSERGATELQISHVIKIFNRQYRPKRFNNRILTKCKVEDCGVNTPLRKNVRDLLIKNIVRFLPLTQPEKAELEAHAIDKEGREKVKTFFRRHRINEFLRKQIYDIAFNQKLSGRTVFCKKHILEHEQHTKEERKVFRLAPSLKTKINNVLAVVKDEILPQFGINKVIMESNNFDIAARTKGKKRLAKDEYGKGHKEAKESLIEVLLRETKNQCVYCGKVITVTTANTDHIFPRKAGGINVFANLVACCRECNEKKKGRTPLESGVLPQPEITAHLENDLKKKILEDARNMNELNLNSIKYMSYASIGWRHMRDRLRGLIGNEELPIERQSGILTAYFRRWWGFRKERGNDIHHALDAVILASRKDYTDDGVDMTLKPQSSDGREFDPEKHLPDTISFKRDKSNKGTPLYDKNPLSIKNSLITRRWMVTEIEHGKEDTIISDEYRKKLKEAFKHLGTSKGKCLTDEEARQTGFYQRKNGNFMSLRCVEKGLGWGQMVKINNNAFKTNVHNIGVAVYLDEKGKKKAYEIKNPRLLKHFVEKPPEIKGKKLYTLRRGDYVTHESEDSVYRIKKLGTSPVLEAVVKGSIGRIRNSASATKLTKVSKPQKVF

SEQ ID NO: 8910 - protein, 564 aa, synthetic construct
  REGION 1..564: note = Synthetic
MQKELVLGIDYGGKYTGLAVVDRRNNQVLYARTVKMRNDVADILEGRREQRGIRRTGQTKKKRLRELKAYLKSISGEYDESIGTFKNEPFMTVYKLCHKRGYDYAEMPEEKTHDEIEAMSADEKKQWEKEKKEREETQRNSRHRDEVTKDVRKVMSERGATELQISHVIKIFNRQYRPKRFNNRILTKCKVEDCGVNTPLRKNVRDLLIKDIVRFLPLTQSEKAELEAHVLDKEGREKVKTFFRRHRINEFLRKQIYDIAFNQKLSGRTVFCKKHILEHEQHTKEERKVFRLAPSLKTKINNVLAVVKDEILPQFGINKVIMESNNFDIAARTKGKKRLAKDEYGKGHKEAKESLIEVLLRETKNQCVYCGKVITVTTANTDHIFPRKAGGINVFANLVACCRECNEKKKGRTPLESGVLPQPEITAHLENDLKKKILEDARNMNELNLNSIKYMSYASIGWRHMRDRLRGLIGNEELPIERQSGILTAYFRRWWGFRKERGNDIHHALDAVILASRKDYTDDGVDMTLKPKSSNGREFDPEKHLPDTISFKRDKSPSVLLPHQ

SEQ ID NO: 8911 - protein, 650 aa, synthetic construct
  REGION 1..650: note = Synthetic
THDEIEAMSADEKKQWEKEKKEREETQRNSRHRDEVTKDVRKVMSERGATELQISHVIKIFNRQYRPKRFNNRILTKCKVEDCGVNTPLRKNVRDLLIKDIVRFLPLTQSEKAELEAHVLDKEGREKVKTFFRRHRINEFLRKQIYDIAFNQKLSGRTVFCKKHILEHEQHTKEERKVFRLAPSLKTKINNVLAVVKDEILPQFGINKVIMESNNFDIAARTKGKKRLAKDEYGKGHKEAKESLIEVLLRETKNQCVYCGKVITVTTANTDHIFPRKAGGINVFANLVACCRECNEKKKGRTPLESGVLPQPEITAHLENDLKKKILEDARNMNELNLNSIKYMSYASIGWRHMRDRLRGLIGNEELPIERQSGILTAYFRRWWGFRKERGNDIHHALDAVILASRKDYTDDGVDMTLKPKSSNGREFDPEKHLPDTISFKRDKSNKGTPLYDKNPLSIKNSLITRRWMVTEIEHGKEDTIISDEYRKKLKEAFKHWGTSKGKCLTDEEARQTGFYQRKNGNFMSLRCVEKGLGWGQMVKINNNAFKTNVHNIGVAVYLDEKGKKKAYEIKNPRLLKHFVEKPPEIKGKKLYTLRRGDYVTHESEDSVYRIKKLGTSPVLEAVVKGSIGRIRNSASATKLTKVSKPQKVF

SEQ ID NO: 8912 - protein, 761 aa, synthetic construct
  REGION 1..761: note = Synthetic
MQKELVLGIDYGGKYTGLAVVDRRNNQVLYARTVKMRDDVADILEGRREQRGIRRTGQTKKKRLRELKTYLKNIGGKYDESIGTFKNEPFMTVYKLCHKRGYDYVEMPKEKTREEIEAMSADEKKQWEKEKKEWEETERNSRHRDEVTKDVRKIMSERDATEQQISHVIKIFNKQYRPKRFNNRILTKCKVEDCGVNTPLRKNVRDLLIKDIVRFLPLTQSEKAELEAHVLDKEGREKVKTFFRRHRINEFLRKQIYDIAFNQKLSGRTVFCKKHILEHEQHTKEERKVFRLAPSLKTKINNVLAVVKDEILPQFGINKVIMESNNFDIAARTKGKKRLAKDEYGKGHKEAKESLIEVLLRETKNQCVYCGKVITVTTANTDHIFPRKAGGINVFANLVACCRECNEKKKGRTPLESGVLPQPEITAHLENDLKKKILEDARNMNELNLNSIKYMSYASIGWRHMRDRLRGLIGNEELPIERQSGILTAYFRRWWGFRKERGNDIHHALDAVILASRKDYTDDGVDMTLKPKSSNGREFDPEKHLPDTISFKRDKSNKGTPLYDKNPLSIKNSLITRRWMVTEIEHGKEDTIISDEYRKKLKEAFKHWGTSKGKCLTDEEARQTGFYQRKNGNFMSLRCVEKGLGWGQMVKINNNAFKTNVHNIGVAVYLDEKGKKKAYEIKNPRLLKHFVEKPPEIKGKKLYTLRRGDYVTHESEDSVYRIKKLGTSPVLEAVVKGSIGRIRNSASATKLTKVSKPQKVF

SEQ ID NO: 8913 - protein, 576 aa, synthetic construct
  REGION 1..576: note = Synthetic
MQKELVLGIDYGGKYTGLAVVDRRNNQVLYARTVKMRDDVADILEGRREQRGIRRTGQTKKKRLRELKTYLKNIGGKYDESIGTFKNEPFMTVYKLCHKRGYDYVEMPKEKTREEIEAMSADEKKQWEKEKKEWEETERNSRHRDEVTKDVRKIMSERDATEQQISHVIKIFNKQYRPKRFNNRILTKCKVEDCGVNTPLRKNVRDLLIKDIVRFLPLTQSEKAELEAHVLDKEGREKVKTFFRRHRINEFLRKQIYDIAFNQKLSGRTVFCKKHILEHEQHTKEERKVFRLAPSLKTKINNVLAVVKDEILPQFGINKVIMESNNFDIAARTKGKKRLAKDEYGKGHKEAKESLIEVLLRETKNQCVYCGKVITVTTANTDHIFPRKAGGINVFANLVACCRECNEKKKGRTPLESGVLPQPEITAHLENDLKKKILEDARNMNELNLNSIKYMSYASIGWRHMRDRLRGLIGNEELPIERQSGILTAYFRRWWGFRKERGNDIHHALDAVILASRKDYTDDGVDMTLKPKSSNGREFDPEKHLPDTISFKRDKSNKGTPLYDKNPLSIKNSLIT

SEQ ID NO: 8914 - protein, 771 aa, synthetic construct
  REGION 1..771: note = Synthetic
MEREIVLGIDYGGKYTGLAIVDRRHNQVLYARTVKMRDDVADILKGRREQRGIRRTAQTKKKRLRELKDYLISIGYNESTAIFKTAYGLAHKRGYDYADIPKEKTPEEIEAMDAEDRKLWEKEKKEWEETKRNSRHREEVLKDVREAMSKGGAAGEQIKRVERIFNKQYRPKRFNNRILTKCKVEGCGKNTPLRKNARDLLLEDKIRWLPMEQADRNKLKTALLEKKKEDVDEMFKTYKVNSEIRKQIRDMAYNEKLSGRTVFCKKHILEHTEHTKEGRKVFRLAPSLKTKIENVLAVIKDEVLPRYQFGKVVMETNNFDIEVKTQGKKKETSDDGQDANSDEKLGLRQRLIKETNGQCVYCGAKINESNMEIDHIFPVIAGGLNIYANMAASCKKCNGDKKGRTPQEAGKFPIPGIIDAIKKNLKPKFVRRKIGRVTRKFAVYNDLKIKILENANSHQTLDFNKYMSHASIGWRHMRDRLREETKNQDLIIDRKHGYQTAHFRKWWPDFIKKQADDKHHALDAVILASRWETDKNGSPDPLHKPVDKEGNEFDPNKHLTIETKKFTRDKGSKGSALHDRNPLSYKKGIITRRFMVTEIECGKEDDVISEAYSEKLKEAFKRFDTKKGKCLTDKEAKEAGFCIKKNEMVMSLKCTIKGTGPGQMIRINNNVFKTNVHNVGVDVYLDEKGKKKAYERKNPRLSKHLIEPPPQPNGRVSFTLKRRDMVTVEGEDTIYRIKKLGTSPTIEAVVGSDGKTRTVLATKLTKANNAE

SEQ ID NO: 8915 - protein, 590 aa, synthetic construct
  REGION 1..590: note = Synthetic
MEREIVLGIDYGGKYTGLAVVDRRHNQVLYANRVKMRDDVADILKGRREQRGIRRTAQTKKKRLRELRNYLKSIGYNESTATFKTVYSLAHKRGYDYADMPEEKTSEKIEAMDEEERKQWEKEKQEWEETKRNSRHREEVLKDVRKAMTEGRAAEEQIKRVESIFNKQYRPKRFNNRILTKCKVCGKNTPLRRKVRELLLENIVRFLPLESEMKETLKQTILEGQQENINKIFRKLKFNQKDWPGKNLTDIAKNKLPGRLPFCKEHFSENEKFTMIEKSTFRLAPSLKTKIENVLAVIKDEILPKFTINKVVMESNNFDIAAKTQGKKRLAKEEYGKGPREGKETRKEALLRETNGRCIYCGKSIDISNAHDDHIFPRKAGGLNIFANLVACCAVCNENKKGRTPLESGILPKPDVIRFMEDEFNRLKIKMWKIRRKQSLTTEEIMDKAKRNKLELKLKILEDAQQVNELDFNKYMSHASIGWRYMRDRLRESAGNKKLPIERQSGIYTAYFRRWWGFKKERGNTLHHALDAVILASRKGYSDDGLVDMTLKPKYNKGGEFDPEKHIPEPIEFKRDKGSKGSALHDRNPL

SEQ ID NO: 8916 - protein, 533 aa, synthetic construct
  REGION 1..533: note = Synthetic
MEREIVLGIDYGGKYTGLAVVDRRHNQVLYANRVKMRDDVADILKGRREQRGIRRTAQTKKKRLRELRNYLKSIGYNESTATFKTVYSLAHKRGYDYADMPEEKTSEKIEAMDEEERKQWEKEKQEWEETKRNSRHREEVLKDVRKAMTEGRAAEEQIKRVESIFNKQYRPKRFNNRILTKCKVCGKNTPLRRKVRELLLENIVRFLPLESEMKETLKQTILEGQQENINKIFRKLKFNQKDWPGKNLTDIAKNKLPGRLPFCKEHFSENEKFTMIEKSTFRLAPSLKTKIENVLAVIKDEILPKFTINKVVMESNNFDIAAKTQGKKRLAKEEYGKGPREGKETRKEALLRETNGRCIYCGKSIDISNAHDDHIFPRKSGGLNIFANLVACCAVCNENKKGRTPLESGILPKPDVIRFMEDEFNRLKIKMWKIRRKQSLTTEEIMDKAKRNKLELKLKILEDAQQVNELDFNKYMSHASIGWRYMRDRLRESAGNKKLPIERQSGIYTAYFRRWWGFKKERGNTLHHALDAV

SEQ ID NO: 8917 - protein, 583 aa, synthetic construct
  REGION 1..583: note = Synthetic
  SITE 534: note = misc_feature - Xaa can be any naturally occurring amino acid
MEKELVLGIDYGGKYTGLGVVDRRNNQVLYARTIKMRDDVADILKGRREQRGIRRTQQTRKKRLRELKKYLNSIGYDNSTELFKSIYSLAHKRGYDYADMPTPEEIEEMDEKEKKEWKDTQRNSRYRKEVLADVRKVMSNGGASDEQIKRVESIFNKQYRPKRFNNRILTKCKVCGKNTPLRRNVRELLLENIVRFLPLESELKETLKRTILEGQQGNINKLFRKLKFNQKDWPGKNLTDIAKNKLPGRLPFCKEHFAENEKFTTIEKSTFRLAPSLKTKIENVLTVIKDEVMPNFALDRVVMESNNFDIAAKTKGKKRLAKEEYSKGHKENRETLMESLLRETDGRCVYCGKTITLADANKDHIYPKKAGGSNIFANLVACCRSCNENKGGRTPSESGIMPNPEVVATIKNDLKKKILDDARSIKQLDFNKYMSHASIGWRHMRDRLKELTGNDKLPVERLSGIVTAYFRRWWGFKKERANDKHHALDAVILASRKDYTDEGLVAMTLKPANSDGREFDPEKHIKESEEFKRXRETRAAEGLPSTTKTRCPLRMAKLLEDIWLRRLKEGRKMLLFLRNGVKS

SEQ ID NO: 8918 - protein, 747 aa, synthetic construct
  REGION 1..747: note = Synthetic
MERELVLGIDYGGKYTGLAVVDRRHNQVLYANRLKMRDDVAGILKDRRKQRGIRRTAQTKKKRLRELKNYLKSIGYNESTATFETVYSLAHKRGYDYADMPEEKTSEEIEAMDVEERKQWEKEKQEWEETKRNSRHREEVLKDVRKVMSDGRASNDQITRVERIFNKQYRPKRFNNRILTKCKVEDCGVNTPLRKNVRDLLIENIVRFFPIEQSEKDNLKDAVLDKNRREEVKSFFRKHKTDEHIRKQVYDIADNKLSGRTVFCKEHILEHTEHSKEERKVFRLAPSLKTKIENVLAVIKDEILPKFTVNKVVMESNNFDIAAKTQGKKRLAKEEYGKGPREGKETRKEALLRETDDRCIYCGKSIDISNAHDDHIFPRKAGGLNIFANLVACCTVCNENKKGRTPLESGILPKPEIIAIIKNDLKKKILEDARNINTVDFNKYMSHASIGWRYMRDRLRESAGNKKLSIERQSGIYTAYFRRWWGFKKERGNTLHHALDAVILASRKGYSDDGLVDMTLKPKYNKGGGFDSEKHLPEPIEFKRDKGSKGSALHDRNPLSYKKGIITRRFMVTEIECGKEDDVISETYREKLKEAFKRFDTKKGKCLTDKEAKEAGFCIKKNELVMSLKCSIKGTGPGQMIRINNNVFKTNVHNVGVDVYLDEKGKKKVYERKNPRLSKHFIEPLPQPNGRASFTLKRGNMVTVEGEDTIYRIKKLGTSPTIEAVVGSDGKTRTVSATKLTKANNAE

SEQ ID NO: 8919 - protein, 747 aa, synthetic construct
  REGION 1..747: note = Synthetic
MERELVLGIDYGGKYTGLAVVDRRHNQVLYANRLKMRDDVAGILKDRRKQRGIRRTAQTKKKRLRELKNYLKSIGYNESTATFETVYSLAHKRGYDYADMPEEKTSEEIEAMDVEERKQWEKEKQEWEETKRNSRHRKEVVKDVHKAMIEGRATEEQIKRVERIFNKQYRPKRFNNRILTKCKVEDCGVNTPLRKNVRDLLIENIVRFFPIEQSEKDNLKDAVLDKNRREEVKSFFRKHKTDEHIRKQVYDIADNKLSGRTVFCKEHILEHTEHSKEERKVFRLAPSLKTKIENVLAVIKDEILPKFTVNKVVMESNNFDIAAKTQGKKRLAKEEYGKGPREGKETRKEALLRETDDRCIYCGKSIDISNAHDDHIFPRKAGGLNIFANLVACCTVCNENKKGRTPLESGILPKPEIIAIIKNDLKKKILEDARNINTVDFNKYMSHASIGWRYMRDRLRESAGNKKLSIERQSGIYTAYFRRWWGFKKERGNTLHHALDAVILASRKGYSDDGLVDMTLKPKYNKGGGFDSEKHLPEPIEFKRDKGSKGSALHDRNPLSYKKGIITRRFMVTEIECGKEDDVISETYREKLKEAFKRFDTKKGKCLTDKEAKEAGFCIKKNELVMSLKCSIKGTGPGQMIRINNNVFKTNVHNVGVDVYLDEKGKKKVYERKNPRLSKHFIEPLPQPNGRASFTLKRGNMVTVEGEDTIYRIKKLGTSPTIEAVVGSDGKTRTVSATKLTKANNAE

SEQ ID NO: 8920 - protein, 747 aa, synthetic construct
  REGION 1..747: note = Synthetic
MERELVLGIDYGGKYTGLAVVDRRHNQVLYANRLKMRDDVAGILKDRRKQRGIRRTAQTKKKRLRELKNYLKSIGYNESTATFETVYSLAHKRGYDYADMPEEKTSEEIEAMDVEERKQWEKEKQEWEETKRNSRHRKEVVKDVHKAMIEGRATEEQIKRVERIFNKQYRPKRFNNRILTKCKVEDCGVNTPLRKNVRDLLIENIVRFFPIEQSEKDNLKDAVLDKNRREEVKSFFRKHKTDEHIRKQVYDIADNKLSGRTVFCKEHILEHTEHSKEERKVFRLAPSLKTKIENVLAVIKDEILPKFTVNKVVMESNNFDIAAKTQGKKRLAKEEYGKGPREGKETRKEALLRETDDRCIYCGKSIDISNAHDDHIFPRKAGGLNIFANLVACCTVCNENKKGRTPLESGILPKPEIIAIIKNDLKKKILEDARNINTVDFNKYMSHASIGWRYMRDRLRESAGNKKLSIERQSGIYTAYFRRWWGFKKERGNTLHHALDAVILASRKGYSDDGLVDMTLKPKYNKGGEFDPEKHLPEPIEFKRDKGSRGSALHDRNPLSYKKGIITRRFMVTEIECGKEDDVISETYREKLKEAFKRFDTKKGKCLTDKEAKEAGFCIKKNELVMSLKCSIKGTGPGQMIRINNNVFKTNVHNVGVDVYLDEKGKKKVYERKNPRLSKHFIEPLPQPNGRASFTLKRGNMVTVEGEDTIYRIKKLGTSPTIEAVVGSDGKTRTVSATKLTKANNAE

SEQ ID NO: 8921 - protein, 699 aa, synthetic construct
  REGION 1..699: note = Synthetic
MERELVLGIDYGGKYTGLAVVDRRHNQVLYANRLKMRDDVAGILKDRRKQRGIRRTAQTKKKRLRELKNYLKSIGYNESTATFETVYSLAHKRGYDYADMPEEKTSEEIEAMDVEERKQWEKEKQEWEETKRNSRHRKEVVKDVHKAMIEGRATEEQIKRVERIFNKQYRPKRFNNRILTKCKVEDCGVNTPLRKNVRDLLIENIVRFFPIEQSEKDNLKDAVLDKNRREEVKSFFRKHKTDEHIRKQVYDIADNKLSGRTVFCKEHILEHTEHSKEERKVFRLAPSLKTKIENVLAVIKDEILPKFTVNKVVMESNNFDIAAKTQGKKRLAKEEYGKGPREGKETRKEALLRETDGRCIYCGKSIDISNAHDDHIFPRKAGGLNIFANLVACCTVCNENKKGRTPLESGILPKPEIIAIIKNDLKKKILEDARNINTVDFNKYMSHASIGWRYMRDRLRESAGNKKLSIERQSGIYTAYFRRWWGFKKERGNTLHHALDAVILASRKGYSDDGLVDMTLKPKYNKGGEFDPEKHLPEPIEFKMDKGSRGSALHDRNPLSYKKGIITRRFMVTEIECGKEDDVISETYREKLKEAFKRFDTKKGKCLTDKEAKEAGFCIKKNELVMSLKCSIKGTGPGQMIRINNNVFKTNVHNVGVDVYLDEKGKKKVYERKNPRLSKHFIEPLPQPNGRASFTLKRG

SEQ ID NO: 8922 - protein, 747 aa, synthetic construct
  REGION 1..747: note = Synthetic
MERELVLGIDYGGKYTGLAVVDRRHNQVLYANRLKMRDDVAGILKDRRKQRGIRRTAQTKKKRLRELKNYLKSIGYNESTATFETVYSLAHKRGYDYADMPEEKTSEEIEAMDVEERKQWEKEKQEWEETKRNSRHRKEVVKDVHKAMIEGRATEEQIKRVERIFNKQYRPKRFNNRILTKCKVEDCGVNTPLRKNVRDLLIENIVRFFPIEQSEKDNLKDAVLDKNRREEVKSFFRKHKTDEHIRKQVYDIADNKLSGRTVFCKEHILEHTEHSKEERKVFRLAPSLKTKIENVLAVIKDEILPKFTVNKVVMESNNFDIAAKTQGKKRLAKEEYGKGPREGKETRKEALLRETDGRCIYCGKSIDISNAHDDHIFPRKAGGLNIFANLVACCAVCNENKKGRTPLESGILPKPEIIAIIKNDLKKKILEDARNINTVDFNKYMSHASIGWRYMRDRLRESAGNKKLPIERQSGIYTAYFRRWWGFKKERGNTLHHALDAVILASRKGYSDDGLVDMTLKPKYNKGGEFDPEKHLPEPIEFKRDKGSRGSALHDRNPLSYKKGIITRRFMVTEIECGKEDDVISETYREKLKEAFKRFDTKKGKCLTDKEAKEAGFCIKKNELVMSLKCSIKGTGPGQMIRINNNVFKTNVHNVGVDVYLDEKGKKKAYERKNPRLSKHFIEPLPQPNGRASFTLKRGNMVTVEGEDTIYRIKKLGTSPTIEAVVGSDGKTRTVSATKLTKANNAE

SEQ ID NO: 8923 - protein, 747 aa, synthetic construct
  REGION 1..747: note = Synthetic
MERELVLGIDYGGKYTGLAVVDRRHNQVLYANRLKMRDDVAGILKDRRKQRGIRRTAQTKKKRLRELKNYLKSIGYNESTATFETVYSLAHKRGYDYADMPEEKTSEEIEAMDVEERKQWEKEKQEWEETKRNSRHRKEVVKDVHKAMIEGRATEEQIKRVERIFNKQYRPKRFNNRILTKCKVEDCGVNTPLRKNVRDLLIENIVRFFPIEQSEKDNLKDAVLDKNRREEVKSFFRKHKTDEHIRKQVYDIADNKLSGRTVFCKEHILEHTEHSKEERKVFRLAPSLKTKIENVLAVIKDEILPKFTVNKVVMESNNFDIAAKTQGKKRLAKEEYGKGPREGKETRKEALLRETDGRCIYCGKSIDISNAHDDHIFPRKAGGLNIFANLVACCAVCNENKKGRTPLESGISPKPEIIAFMKNDLKKKILEDARNINTVDFNKYMSHASIGWRYMRDRLRESAGNKKLPIERQSGIYTAYFRRWWGFKKERGNTLHHALDAVILASRKGYSDDGLVDMTLKPKYNKGGEFDPEKHLPEPIEFKMDKGSRGSALHDRNPLSYKKGIITRRFMVTEIECGKEDDVISETYREKLKEAFKRFDTKKGKCLTDKEAKEAGFCIKKNELVMSLKCSIKGTGPGQMIRINNNVFKTNVHNVGVDVYLDEKGKKKVYERKNPRLSKHFIEPLPQPNGRASFTLKRGNMVTVEGEDTIYRIKKLGTSPTIEAVVGSDGKTRTVSATKLTKANNAE

SEQ ID NO: 8924 - protein, 657 aa, synthetic construct
  REGION 1..657: note = Synthetic
HPFNDGNGRIGRVIINYQLYRLGFPGIIIREKEKQEWEETKRNSRHRKEVVKDVHKAMIEGRATEEQIKRVERIFNKQYRPKRFNNRILTKCKVEDCGVNTPLRKNVRDLLIENIVRFFPIEQSEKDNLKDAVLDKNRREEVKSFFRKHKTNEHIRKQVYDIADNKLSGRTVFCKEHILEHTEHSKEERKVFRLAPSLKTKIENVLAVIKDEILPKFTVNKVVMESNNFDIAAKTQGKKRLAKEEYGKGPREGKETRKEALLRETDGRCIYCGKSIDISNAHDDHIFPRKAGGLNIFANLVACCAVCNENKKGRTPLESGISPKPEIIAFMKNDLKKKILEDARNINTVDFNKYMSHASIGWRYMRDRLRESAGNKKLPIERQSGIYTAYFRRWWGFKKERGNTLHHALDAVILASRKGYSDDGLVDMTLKPKYNKGGEFDPEKHIPEPIEFKRDKGSKGSALHDRNPLSYKKGIITRRFMVTEIECGKEDDVISETYREKLKEAFKRFDTKKGKCLTDKEAKEAGFCIKKNELVMSLKCSIKGTGPGQMIRINNNVFKTNVHNVGVDVYLDEKGKKKVYERKNPRLSKHFIEPLPQPNGRASFTLKRGNMVTVEGEDAIYRIKKLGTSPTIEAVVGSDGKTRTVSATKLTKANSAE

SEQ ID NO: 8925 - protein, 510 aa, synthetic construct
  REGION 1..510: note = Synthetic
MERELVLGIDYGGKYTGLAVVDRRHNQVLYANRLKMRDDVAGILKDRRKQRGIRRTAQTKKKRLRELKNYLKSIGYNESTATFETVYSLAHKRGYDYADMPEEKTSEEIEAMDVEERKQWEKEKQEWEETKRNSRHRKEVVKDVHKAMIEGRATEEQIKRVERIFNKQYRPKRFNNRILTKCKVEDCGVNTPLRKNVRDLLIENIVRFFPIEQSEKDNLKDAVLDKNRREEVKSFFRKHKTDEHIRKQVYDIADNKLSGRTVFCKEHILEHTEHSKEERKVFRLAPSLKTKIENVLAVIKDEILPKFTVNKVVMESNNFDIAAKTQGKKRLAKEEYGKGPREGKETRKEALLRETDGRCIYCGKSIDISNAHDDHIFPRKAGGLNIFANLVACCAVCNENKKGRTPLESGISPKPEIIAFMKNDLKKKILEDARNINTVDFNKYMSHASIGWRYMRDRLRESAGNKKLPIERQSGIYTAYFRRWWGFKKERGNTLHHALDAVILASRKGY

SEQ ID NO: 8926 - protein, 619 aa, synthetic construct
  REGION 1..619: note = Synthetic
MERELVLGIDYGGKYTGLAVVDRRHNQVLYANRLKMRDDVAGILKDRRKQRGIRRTAQTKKKRLRELKNYLKSIGYNESTATFETVYSLAHKRGYDYADMPEEKTSEEIEAMDVEERKQWEKEKQEWEETKRNSRHRKEVVKDVHKAMIEGRATEEQIKRVERIFNKQYRPKRFNNRILTKCKVEDCGVNTPLRKNVRDLLIENIVRFFPIEQSEKDNLKDAVLDKNRREEVKSFFRKHKTDEHIRKQVYDIADNKLSGRTVFCKEHILEHTEHSKEERKVFRLAPSLKTKIENVLAVIKDEILPKFTVNKVVMESNNFDIAAKTQGKKRLAKEEYGKGPREGKETRKEALLRETDGRCIYCGKSIDISNAHDDHIFPRKAGGLNIFANLVACCAVCNENKKGRTPLESGISPKPEIIAFMKNDLKKKILEDARNINTVDFNKYMSHASIGWRYMRDRLRESAGNKKLPIERQSGIYTAYFRRWWGFKKERGNTLHHALDAVILASRKGYSDDGLVDMTLKPKYNKGGEFDPEKHLPEPIEFKMDKGSRGSALHDRNPLSYKKGIITRRFMVTEIECGKEDDVISETYREKLKEAFKRFDTKKGKCLTDKEAKEAGFCI

SEQ ID NO: 8927 - protein, 510 aa, synthetic construct
  REGION 1..510: note = Synthetic
MERELVLGIDYGGKYTGLAVVDRRHNQVLYANRLKMRDDVAGILKDRRKQRGIRRTAQTKKKRLRELKNYLKSIGYNESTATFETVYSLAHKRGYDYADMPEEKTSEEIEAMDVEERKQWEKEKQEWEETKRNSRHRKEVVKDVHKAMIEGRATEEQIKRVERIFNKQYRPKRFNNRILTKCKVEDCGVNTPLRKNVRDLLIENIVRFFPIEQSEKDNLKDAVLDKNRREEVKSFFRKHKTDEHIRKQVYDIADNKLSGRTVFCKEHILEHTEHSKEERKVFRLAPSLKTKIENVLAVIKDEILPKFTVNKVVMESNNFDIAAKTQGKKRLAKEEYGKGPREGKETRKEALLRETDDRCIYCGKSIDISNAHDDHIFPRKAGGLNIFANLVACCAVCNENKKGRTPLESGISPKPEIIAFMKNDLKKKILEDARNINTVDFNKYMSHASIGWRYMRDRLRESAGNKKLPIERQSGIYTAYFRRWWGFKKERGNTLHHALDAVILASRKGY

SEQ ID NO: 8928 - protein, 746 aa, synthetic construct
  REGION 1..746: note = Synthetic
MERELVLGIDYGGKYTGLAVVDRRHNQVLYANRLKMRDDVAGILKDRRKQRGIRRTAQTKKKRLRELKNYLKSIGYNESTATFETVYSLAHKRGYDYADMPEEKTSEEIEAMDVEERKQWEKEKQEWEETKRNSRHRKEVVKDVHKAMIEGRATEEQIKRVERIFNKQYRPKRFNNRILTKCKVEDCGVNTPLRKNVRDLLIENIVRFFPIEQSEKDNLKDAVLDKNRREEVKSFFRKHKTDEHIRKQVYDIADNKLSGRTVFCKEHILEHTEHSKEERKVFRLAPSLKTKIENVLAVIKDEILPKFTVNKVVMESNNFDIAAKTQGKKRLAKEEYGKGPREGKETRKEALLRETDGRCIYCGKSIDISNAHDDHIFPRKAGGLNIFANLVACCAVCNENKKGRTPLESGISPKPEIIAFMKNDLKKKILEDARNINTVDFNKYMSHASIGWRYMRDRLRESAGNKKLPIERQSGIYTAYFRRWWGFKKERGNTLHHALDAVILASRKGYSDDGLVDMTLKPKYNKGGGFDSEKHLPEPIEFKRDKGSKGSALHDRNPLSYKKGIITRRFMVTEIECGKEDDVISETYREKLKEAFKRFDTKKGKCLTDKEAKEAGFCIKKNELVMSLKCSIKGTGPGQMIRINNNVFKTNVHNVGVDVYLDEKGKKKAYERKNPRLSKHFIEPPPQPNGRVSFTLKRRDMVTVEGEDTIYRIKKLGTSPTIEAVVGSDGKTRTVSATKLTKANSA

SEQ ID NO: 8929 - protein, 747 aa, synthetic construct
  REGION 1..747: note = Synthetic
MERELVLGIDYGGKYTGLAVVDRRHNQVLYANRLKMRDDVAGILKDRRKQRGIRRTAQTKKKRLRELKNYLKSIGYNESTATFETVYSLAHKRGYDYADMPEEKTSEEIEAMDVEERKQWEKEKQEWEETKRNSRHRKEVVKDVHKAMIEGRATEEQIKRVERIFNKQYRPKRFNNRILTKCKVEDCGVNTPLRKNVRDLLIENIVRFFPIEQSEKDNLKDAVLDKNRREEVKSFFRKHKTDEHIRKQVYDIADNKLSGRTVFCKEHILEHTEHSKEERKVFRLAPSLKTKIENVLAVIKDEILPKFTVNKVVMESNNFDIAAKTQGKKRLAKEEYGKGPREGKETRKEALLLETNGRCIYCGKAIDISNAHDDHIFPRKSGGLNIFANLVACCAVCNENKKGRTPLESGILPKPEIIAIIKNDLKKKILEDARNINTVDFNKYMSHASIGWRYMRDRLRESAGNKKLPIERQSGIYTAYFRRWWGFKKERGNTLHHALDAVILASRKGYSDDGLVDMTLKPKYNKGGGFDSEKHLPEPIEFKRDKGSKGSALHDRNPLSYKKGIITRRFMVTEIECGKEDDVISETYREKLKEAFKRFDTKKGKCLTDKEAKEAGFCIKKNELVMSLKCSIKGTGPGQMIRINNNVFKTNVHNVGVDVYLDEKGKKKAYERKNPRLSKHFIEPPPQPNGRVSFTLKRRDMVTVEGEDAIYRIKKLGTSPTIEAVVGSDGKTRTVSATKLTKANSAE

SEQ ID NO: 8930 - protein, 747 aa, synthetic construct
  REGION 1..747: note = Synthetic
MERELVLGIDYGGKYTGLAVVDRRHNQVLYANRLKMRDDVAGILKDRRKQRGIRRTAQTKKKRLRELKNYLKSIGYNESTATFETVYSLAHKRGYDYADMPEEKTSEEIEAMDVEERKQWEKEKQEWEETKRNSRHRKEVVKDVHKAMIEGRATEEQIKRVERIFNKQYRPKRFNNRILTKCKVEDCGVNTPLRKNVRDLLIENIVRFFPIEQSEKDNLKDAVLDKNRREEVKSFFRKHKTDEHIRKQVYDIADNKLSGRTVFCKEHILEHTEHSKEERKVFRLAPSLKTKIENVLAVIKDEILPKFTVNKVVMESNNFDIAAKTQGKKRLAKEEYGKGPREGKETRKEALLRETDDRCIYCGKSIDISNAHDDHIFPRKAGGLNIFANLVACCTVCNENKKGRTPLESGILPKPEIIAIIKNDLKKKILEDARNINTVDFNKYMSHASIGWRYMRDRLRESAGNKKLSIERQSGIYTAYFRRWWGFKKERGNTLHHALDAVILASRKGYSDDGLVDMTLKPKYNKGGGFDSEKHLPEPIEFKRDKGSKGSALHDRNPLSYKKGIITRRFMVTEIECGKEDDVISETYREKLKEAFKRFDTKKGKCLTDKEAKEAGFCIKKNELVMSLKCSIKGTGPGQMIRINNNVFKTNVHNVGVDVYLDEKGKKKAYERKNPRLSKHFIEPPPQPNGRVSFTLKRRDMVTVEGEDAIYRIKKLGTSPTIEAVVGSDGKTRTVSATKLTKANSAE

SEQ ID NO: 8931 - protein, 747 aa, synthetic construct
  REGION 1..747: note = Synthetic
MERELVLGIDYGGKYTGLAVVDRRHNQVLYANRLKMRDDVAGILKDRRKQRGIRRTAQTKKKRLRELKNYLKSIGYNESTATFETVYSLAHKRGYDYADMPEEKTSEEIEAMDVEERKQWEKEKQEWEETKRNSRHRKEVVKDVHKAMIEGRATEEQIKRVERIFNKQYRPKRFNNRILTKCKVEDCGVNTPLRKNVRDLLIENIVRFFPIEQSEKDNLKDAVLDKNRREEVKSFFRKHKTDEHIRKQVYDIADNKLSGRTVFCKEHILEHTEHSKEERKVFRLAPSLKTKIENVLAVIKDEILPKFTVNKVVMESNNFDIAAKTQGKKRLAKEEYGKGPREGKETRKEALLRETDGRCIYCGKSIDISNAHDDHIFPRKAGGLNIFANLVACCTVCNENKKGRTPLESGILPKPEIIAIIKNDLKKKILEDARNINTVDFNKYMSHASIGWRYMRDRLRESAGNKKLSIERQSGIYTAYFRRWWGFKKERGNTLHHALDAVILASRKGYSDDGLVDMTLKPKYNKGGEFDPEKHLPEPIEFKMDKGSRGSALHDRNPLSYKKGIITRRFMVTEIECGKEDDVISETYREKLKEAFKRFDTKKGKCLTDKEAKEAGFCIKKNELVMSLKCSIKGTGPGQMIRINNNVFKTNVHNVGVDVYLDEKGKKKAYERKNPRLSKHFIEPPPQPNGRVSFTLKRRDMVTVEGEDAIYRIKKLGTSPTIEAVVGSDGKTRTVSATKLTKANSAE

SEQ ID NO: 8932 - protein, 987 aa, synthetic construct
  REGION 1..987: note = Synthetic
MTMTFCLGIDYGEKYIGFSVVEQTAEGNIPRFLGTMEVQRKPIETTLDSRALARRARRTRKTKRRRLKRLGAAFLSLGLPSKQADELLRYCSGRGFGHPAKEDQEQDQKEMPFAISRDEFLTALTQEIKRLIASEDQERVLAVCRRHLRREIRPMRVENRKPSKCAWEGCDRNVRRAKNAKRERLQQALFAWLTDIIRRRESPAQLWQALESWIDRALASPKRVPFKALYTLVPEPAFQKHKAVYEKNIRDILQGESAGRTRFCCEHSNVYIQYVVTGRTIPTKTDFSPADVGRIEQKIFTDLWRYLEARVLPLVGQIDEIVVERVAFDVLRGYHPDRKQDKSINEAEAYKHYQQGPAYGFQDRREMLTKEFDGRCAYCGKRSPLTEVEHLLPQSRFPFDAYLNIVPACPACNARKGSRTAAEAGMTIHDDAYEAYGKYVGKRKIDGFRARHPYHDTKKGLLNRMRHAGSALDAEQALAMILSDLTHIGNSQRVPRPLARYLAQCIETRTGKPCAIRAQSGRLTALYRTIMLPEYAKDHGDDYNHAIDAAILACKVPSFGAWSAPLRRVSQSHACRWRERVLKASPLLFEKRPAVPADAILEIIPGFETLLPGGYVRVRLSSFNWNKKNQATCKLDPVGTNRLTGKDQKQASAAEFHKELKDLIALVAKEAAAPPEVEAETALPEEGSGKQKKRKKKPALKMLEQSIRKVTSSGLRTYLLADMLHADVRLLEHLRASINTEGMGTHPNDLNRRRLLDDFRAGKNDEIPQMGISLTKAGGNFTVPRKTDSQRLGRFQAAHSSLQCLYVGYQCEKGVLEEKLVIFKLNRIFQVTEPKVKVPNDSPLVTGRPLGSQEKEADFSARWVAAFRDYCRTQGIERVERVTQGCVIERGDGSRFYVQNLDLSKNSLTPAALRDIKNVFRSPLCAAVVNKQAKQLSNSVPRDHASGNVAAAQETQETKQPNIEAVEANDAEEVGATRTTGCSHDWR

SEQ ID NO: 8933 - protein, 645 aa, synthetic construct
  REGION 1..645: note = Synthetic
MSVTLTIDPGSRNIGLALVRSRAGDRPSALYAACIVAEPKPLKELVVRRAQLRRMRRTRKTRRRRLRRLADALRGIAGAEAIVRFCRRRGYSHDPKRARDGRGADDSTGADKLLFNVSREDFFKALEAEVQRVIAEPDRQRVLAACRRHLNAARLPGRELRPPRFDNRAVGRCRWQDCPRRPRRRANAVEENLRQTLYEWLKPVFGEALAGLEQAEAAKAKSKMCAELDHWCSLLAKLAAEYRKLADEQPDQRDEKAIKKVSALLERRKNELYQKIVDWAQENAPAKAGRKFAEDFEAYCDKKRSKGKQKWEGVSAAGATQAGAVGQKKKKKKKKRGFGNQLDDIVVKGRAGRLQYCREHTEQYIQYFLEGKPIPNREDVLDRDIRSRRQKIVFDRLWALIRGRLLPLAGGRIDRIVVERVAFDVLAGTFADCQELFRTDEEKAAEMYWFGPRHGFKNELEMLRTEFAGRCAYCGQQFQDLEVEHILPRSRFPFDSYLVKVPACRQCNMKKGGRSILEAQMRIHPDAYDAYEQYLEKREVRHYFCDIKKGVLKLLTNGAQNWGFERLLGMIAHNIFEQGKSQNAPRALGRWLAGKLERETGVRPKVVFLSGRHTAAWRQQVLPDYEKAAEKAEGKKRNHAVDAIL

SEQ ID NO: 8934 - protein, 720 aa, synthetic construct
  REGION 1..720: note = Synthetic
MSVTLTIDPGSRNIGLALVRSRAGDRPSALYAACIVAEPKPLKELVVRRAQLRRMRRTRKTRRRRLRRLADALRGIAGAEAIVRFCRRRGYSHDPKRARDGRGADDSTGADKLLFNVSREDFFKALEAEVQRVIAEPDRQRVLAACRRHLNAARLPGRELRPPRFDNRAVGRCRWQDCPRRPRRRANAVEENLRQTLYEWLKPVFGEALAGLEQAEAAKAKSKMCAELDHWCSLLAKLAAEYRKLADEQPDQRDEKAIKKVSALLERRKNELYQKIVDWAQENAPAKAGRKFAEDFEAYCDKKRSKGKQKWEGVSAAGATQAGAVGQKKKKKKKKRGFGNQLDDIVVKGRAGRLQYCREHTEQYIQYFLEGKPIPNREDVLDRDIRSRRQKIVFDRLWALIRGRLLPLAGGRIDRIVVERVAFDVLAGTFADCQELFRTDEEKAAEMYWFGPRHGFKNELEMLRTEFAGRCAYCGQQFQDLEVEHILPRSRFPFDSYLVKVPACRQCNMKKGGRSILEAQMRIHPDAYDAYERYLEKREVRHCFCDIKKGVLKLLTNGAQNWGFERLLGMIAHNIFEQGKSQNAPRALGRWLAGKLERETGVRPEVVFLSGRYTAAWRQQVLPDYEKAAEKAEGKKRNHAVDAILLGCIPKVKFDSQRKWWLSEDRLRGWEEQVKAAAPELADLAGDGDAAPARLPRVEAPPPIRFFEEDLGGGYFKIDL

SEQ ID NO: 8935 - protein, 938 aa, synthetic construct
  REGION 1..938: note = Synthetic
MPHTLAIDFGSQYIGLALVKHGTEVPNRILYAATINVAAKPLAQLVTPRAQVRRIRRTRKTHQRRLRQLQAAIAGTLGAEQLVRFCGRRGYSYAVDPEGEPAPGFHVPRAQFFSALRQEVERVIPAADRPRVMLACTKHLNEACDRDAELRPARFENRGPSKCQWLGCHHNVPRADNDYLGRMQQAIYVWLKPVFDVSTDPARLRRSVDHWTAELDQLAHAYSHTEKLTGDARKAERKKLTARRTRIGKNLLARVRREASGEVAEAFATNWSEHYSRNLTDIVSGKQGGRVRYCRQHSRQFVDEFLAGRVIPHRMDVTPADLVSRRQQILFDRLWRLVEARLLPLAGGRIDRVVVERVAFDVLAGSFENRQKLSEAKADGMYSQGPMFGFASRRDMLSAEFAGKCAYCFEESATDQVEHLLPRSQFPLDSYFNVVPACAPCNARKGARSPVAAGMSISDGAYEAYCDYVSSLAVPHIFHTMKKGMLNLLRRSGNVDAERMLGMLANNLVTITNTQRGPRPLARYLATRLVQVTGHRPETAFRAGRHTALYRMALLPDYDKQAEKQAGDLRNHAVDAIMLGCNLPSVTALENPRWTIGTRDLSQWIERVRAAGPALSDGLPLVEGPAALPHFEHGLGEGYISIELSAFNWNQSRKATHGLDPFALTPQREPLKRIPAQDVLQGLLSDTQRTIQIRAIAKPGLRLLLERDPTKAALRFVEWLQRTTRSGLLQGTMSRHPADVSRRQLLEDFARTPAAIIVAGEHSIPWTIGIRCLIAGSRGKVDATRCNGNGEIIHRYQSQPTIREVYVGYAQNKGAIDRSVPIFLFVNQALAVFCGTMANRHPVDVPAGSPLLGRPHGSRQPYKEFQIAWQAALDELCARLGIRVRMKLAQGCVIEKTDGTKFQLRNFDKSQPWMKPDSFRNIYRIHRSPLRAIAVADC

SEQ ID NO: 8936 - protein, 935 aa, synthetic construct
  REGION 1..935: note = Synthetic
MPLPSTTIAIDYGAKYIGLALVEHAEGAPNRVLYACTVVVDPKPLKELVKPRADTRRLRRTRKTHRRRLRRLAQSLADVPNADQILRFCGRRGFSHESDDDQDEQTFRVSRARFFQSLEEEVEQAITPEFRERVLAACSKHLNRLRQPSAELRPARFENRGRSRCNWAGCRNNVPRAGHDIQGRLQQCIFLWLQPIFRESNEPERFRKSVDHWVRELAGLAKGHRRSKASTAYRKQINARKRTIYSHVRKRVRREASEETAAQFDSNWSDYYQSNLNNVIEGKDAGRVRYCRQHSAMFVDHIMASEPIPNREDIRDSDLISRTQQIVFRRLWRLIEGRFLPLAGGRIDRVVVERVAFDILSGPIKQRQKMPEDRAAEMYWHGPQAGFDGRRDMLKAEFGNRCAYCGQEAFSEIEHVYNRSDFPFDSYFNIVPACTKCNARKGGRTAFDAGMTIHDDAYAAYCDYLKAKKVLHPYHTIKKGMLNLLRRSATSERAQQLIGMIADNLVSITATQRAPRPLGRYLATKISERTGQRPEIAFRAGRHTALYRSVILPSYDKAEAREADDLRNHAVDAIVLGCRLPSASALENRKWTTSRDDVLRWMESVKEAAPAMQDGLPAVESVVVVPHFETDAGLNYITIALSAFNWNRKRKAAHKLDPFGKTAAGIPMKRMPAATVLANLLKGEKQRDNQIDVIAHRTLRESLLANRDTAGETFVLWLQKSVRAGLTNDEMSSHPADQERRRLLGEFTAAPVSEIVAEPKGSKIPWTIGIRCLNRDTGAPRKVHVARRLGGNDRAQFYPAQAVIREIRVGYREADDQLDRNAPIIFAVNQIDELSRQVPGRWEPVDVPSESPLRGRPLASEGSRKEFRKRWEDAFADLCRKHDIAKVFRITQGCVIEKTDGAKFQIRNFDKSQPWMKGGPFKQIRRVYRSPFQAM

SEQ ID NO: 8937 - protein, 945 aa, synthetic construct
  REGION 1..945: note = Synthetic
MAATLSIDYGSKYLGISLVQHESGVENRVLYAATVVAEPKPLKALVETRAMTRRMRRTRKTHERRLRHLADALCGIRHAEKILLFCRRRGFSYTPDETDDVETQFHVPRAVFFESLRREIEFEINACDRDRVWKACQRHLNEGCRREGELRPARFDNRGPSKCQWIGCKRNVPRAANAIEERLQQALFAWLKPIFDVSADPVRLRRSVNHWIGELAALSRAYARLKEDDRDTVASQRKLLDKRKGRIFLLLKNRASTEAPNANGEAFADNWRETYSKNVTEIVKGERSGRVPYCREHSREFVEYFLAGKPIPNRTDITEADLFGRTQQILFMRLWRLVEARLLPLAGGRIDRIIVERAAFDILAGKFKDRRDISEDKAAEMYWHGPLFGFDSRGDMLKQEFDGYCAYCGEKNASLQIEHVLPQSKFPFDSYFNILPSCIACNAQKGARTPLEAGMRVHQAAFDAYAEYLSQLRPPHYFHTIKKGLLKLLTREGHSPDVEKQLGMLAENLLSITNTQKGQRPLARYLAGKLETKTGMRPEIGYTAGRHTAVYRSILLPDYDKREAKAEKDLVNHAVDAVILGCRLPSVAAAENRRWYRSAEELNEWRNKVLNAGPELYEGLPAVQATTPISFFETDLGGGFFQIDLSAFNWNRKRHSEHKLDPVCISRSGRPCKRESAAGVFAELLKDEEQRKKQIEKIAHPALKKLLRENLSHAAEKFVAWLQKSIQVKIALGKMGRHPSDQARKLLLEEFASTPCDQFLNADKKQRKDIPRTIGIRCEIAAAATKFDIARCDSSGNVFQNYMSGPKWRNIYVGYQMQNGQLNRQSPFEFWVNQLGKVTVWKGSASIPLDVMPDSPLLGRPLGGRMNIKEFQQSWAMAFDALCRDLGIKKRFSLGQGVVIEKMDGTVTLLRNFDKGKPWMSVATFRNIKRVYRSPLGYLRKKAGE

SEQ ID NO: 8938 - protein, 764 aa, synthetic construct
  REGION 1..764: note = Synthetic
MAATLSIDYGSKYLGISLVQHESGVENRVLYAATVVAEPKPLKALVETRAMTRRMRRTRKTHERRLRHLADALCGIRHAEKILLFCRRRGFSYTPDETDDVETQFHVPRAVFFESLRREIEFEINACDRDRVWKACQRHLNEGCRREGELRPARFDNRGPSKCQWIGCKRNVPRAANAIEERLQQALFAWLKPIFDVSADPVRLRRSVNHWIGELAALSRAYARLKEDDRDTVASQRKLLDKRKGRIFLLLKNRASTEAPNANGEAFADNWRETYSKNVTEIVKGERSGRVPYCREHSREFVEYFLAGKPIPNRTDITEADLFGRTQQILFMRLWRLVEARLLPLAGGRIDRIIVERAAFDILAGKFKDRRDISEDKAAEMYWHGPLFGFDSRGDMLKQEFDGYCAYCGEKNASLQIEHVLPQSKFPFDSYFNILPSCIACNAQKGARTPLEAGMRVHQAAFDAYAEYLSQLRPPHYFHTIKKGLLKLLTREGHSPDVEKQLGMLAENLLSITNTQKGQRPLARYLAGKLETKTGMRPEIGYTAGRHTAVYRSILLPDYDKREAKAEKDLVNHAVDAVILGCRLPSVAAAENRRWYRSAEELNEWRNKVLNAGPELYEGLPAVQATTPISFFETDLGGGFFQIDLSAFNWNRKRHSEHKLDPVCISRSGRPCKRESAAGVFAELLKDEEQRKKQIEKIAHPALKKLLRENLSHAAEKFVAWLQKSIQVKIALGKMGRHPSDQARKLLLEEFASTPCDQFLNADK

SEQ ID NO: 8939 - protein, 832 aa, synthetic construct
  REGION 1..832: note = Synthetic
MPSTLAIDFGSRNIGIALLKHTSDVPNRILYAATIVVNAKPLNSAVQPRAMSRRMRRTRKTHIRRLRGLAEALHGIAGAEQIVRFCRRRGYSHDPDDGDEETRGLSFSRADFFGALRQEIEQVVPAEDRERVLRACSKHLDESRRRDAELRPARFENRGPSKCQWEGCRSNVARADNNAKGRLQQALYAWLKPVFDVSENAAALRRSVDHWIAELDALARWYHKTEKLDEVAAKEERKKIDQRKNRVYRNLRERVANECSEEVAEAFKENWGKTYSRNLTDIVHGGQAGRVRYCREHSDRFVDYFLAGKQIPNRTEVFETDLFGRTQQILFRRIWRLVECRLLPLAGGHIDRVVVERVAFDVLAGKAKNRRETPEDKAAEMYWYGPQYGFSSRREMLTKEFDGRCAYCGQQTAMHEVEHLLPRSQFPFDSYFNVLPACNTCNSQKGARTPFAARMSIHQDAYQAYSDYVGGLKTPHHFHTIKKGMLKLMARAGNSAEVEKELGMLADNLVTITTTQRGPRPLARYLASRLEGLTQKPCKASWTSGRHTALYRSILLPEYRKDEQKEQGDLVNHAVDAVILGCDLPSATAMENRRWYARNQDLLAWREKVQKNAPMLVNGVPQVEPVELISFFEEALGDGYCTIDLSAFNWNRSRQSGHKLDPVGVTTGGNSIKREPATEVLANLADSASRGDRIKQIAHPALRAILEADPEHAPERLVRWLQQTVKAGLAVGRMGNHPSDQARQQSLTEFVESPAEAYLTDDPEKRKDIPRTIGIRCLGVRAAALFDVSRCDDAGKVYQHYKSDPHFRAIYIGYRMRNGSLDRSKPVQLCVN

SEQ ID NO: 8940 - protein, 713 aa, synthetic construct
  REGION 1..713: note = Synthetic
MSCTLAVDFGSRNIGVALVEHAPDAPNRVLYAGTIVVDAKPLNSAVQPRAMARRMRRTRKTHERRLRRLAQALHGVPNADHVVRFCRRRGYSYEPEEETDEGTRALSFSRAEFFDALRREIQQSIPIQQQDQVLRACSKHLNETRRRDAELRPARFENRGPTKCQWEGCRRNVPRAGNDAKGRLQQALYVWTKPVFDVSENAGALRRSIDHWIAELDALARWYRKTRTLDEAAAKEERKKIDRRKNHVYKNLRERVGRECTGDLIEQFKENWGRTYSRNLTDIVHGGQGGRVRYCREHSLRFVDYFLAGKQIPSRAEVFESDLFGRTQQILFRRIWRFVECRLLPLADGHIDRVVVERVAFDVLAGKAKNRREVPEDKAAEMYWHGPQYGFSSRLEMFKKEFDGRYAYCGRQNAIHEVEHLLPRSQFAFDSYLNILPACSTCNSQKGPRTAFAARMSVHQDAYQAYSDYVGRLKTPHLFHTIKKGMLKLLARSGNGNEVEKELGMLANNLVTITSTQKGPRPLARFLASGLEGLTQKPCHASWTSGRHTALYHSILLPEYRKAEEKEKGDLINHAVDAIILGCDLPSATAIENPRWYARAQDLIAWREKVQENGPVLTNGLPQVEPVELMPFFEDGLGDGYSKIDLSAFNWNRSRQSGHKLDPVGVTQNGQPIKPSVTVHTPVDAASRRVFRRYRGPFARTKRRDAASTVADP

SEQ ID NO: 8941 - protein, 699 aa, synthetic construct
  REGION 1..699: note = Synthetic
MVNTLAIDFGSKYIGVALVQHSETTPNRVLYAATLIVAARPLKAAVEDRAKTRRMRRTRKTHARRLRRLAQALADIPNAAHIVRFCRRRGYSHDPDDTDEGTRSLHFPRAEFFECLRQEVARIIAPEDQERMLRACAKHLNAAKRREAELRPARFDNRGPSKCQWEGCRQNVPRAANAFRERLQQALCVWMKPVFDESQAPDRLRRSVDHWVRELEGLARWYAKTRDLEADAQQSERKAIDKRRKLVYKAIRDRVAQEASQRVAEEFNANWSEGRGYRANLTDIVCGKQGGRLRYCRKHSDCFVDFFLAGKQIPNRTDIAESDLFGRRQQIVFGRIWRLVEDRLLPLAGGGIDRVVVERVAFDVLAGKAKDRRDLREGEAAEMYWYGPQHGFQSRKEMLKAEFDGRCAYCGRQGEFQEVEHVLPRSQFPFDSYLNVLPACSACNHQKGSRTPLAAGMTIHREAYSAYADYVGRLKPPHLFHTIKKGMLNLLARNGNCHEVEKQLGMLADNLVTITTTQKSPRPLARYLASKLAKTTGQPCEPGWTSGRHTALYREIVLPDYSKPAEKERGDVINHAVDAVILGCKFPSAAALENRRWYFRASDINTWREQVLAAAPALGNGLPRIEPVVFLPFFEEDLGGGYCAIDLTAFSWNRGRQSGHLLDPVGVTAQGQRVKRDPAAEVLANLKKGSERDEQIRRI

SEQ ID NO: 8942 - protein, 951 aa, synthetic construct
  REGION 1..951: note = Synthetic
MVNTLAIDFGSKYIGVALVQHSETTPNRVLYAATLIVAARPLKAAVEDRAKTRRMRRTRKTHARRLRRLAQALADIPNAAHIVRFCRRRGYSHDPDDTDEGTRSLHFPRAEFFECLRQEVARIIAPEDQERMLRACAKHLNAAKRREAELRPARFDNRGPSKCQWEGCRQNVPRAANAFRERLQQALCVWMKPVFDESQAPDRLRRSVDHWVRELEGLARWYAKTRDLEADAQQSERKAIDKRRKLVYKAIRDRVAQEASQRVAEEFNANWSEGRGYRANLTDIVCGKQGGRLRYCRKHSDCFVDFFLAGKQIPNRTDIAESDLFGRRQQIVFGRIWRLVEDRLLPLAGGGIDRVVVERVAFDVLAGKAKDRRDLREGEAAEMYWYGPQHGFQSRKEMLKAEFDGRCAYCGRQGEFQEVEHVLPRSQFPFDSYLNVLPACSACNHQKGSRTPLAAGMTIHREAYSAYADYVGRLKPPHLFHTIKKGMLNLLARNGNCHEVEKQLGMLADNLVTITTTQKSPRPLARYLASKLAKTTGQPCEPGWTSGRHTALYREIVLPDYSKPAEKERGDVINHAVDAVILGCKFPSAAALENRRWYFRASDINTWREQVLAAAPALGNGLPRIEPVVFLPFFEEDLGGGYCAIDLTAFSWNRGRQSGHLLDPVGVTAQGQRVKRDPAAEVLANLKKGSERDEQIRRIAHPALRKRLQADPNRAAENLVLWLQASVQAGLVNGGMGNHPGDQAGKRLLEEFVTQPVESFLTEDKDLQRGIPRGIGVRCLIAGAAGSFDVARCDEEGRVFQHYKADPHWRCLCVGYRERNGALDRRRPELLWVNQVRAVSRGASGSQVPLDVPDDSPLRGRPLGGRGSLKAFLTEWQQAFDALCHADGIVKVFRITQGCVIEKTDGTCFQLRNFMREQPWMKRSPFRDIRRVYRSPVRFWRACANSAAPPE

SEQ ID NO: 8943 - protein, 923 aa, synthetic construct
  REGION 1..923: note = Synthetic
LFAGTMVLDARRIKEKVEPRAAIRRLRRTRRTKKARLRNLRAGLTALGLEESAVSEVVRFSGRRGYKSLFKERDEGDDSSARVTREEFFQALETELAGIIPSPRLRDQALKVCERILNRVGNRAYEMRPLRIENRGRKRCAWAGCEKVTPRRVNATDDAVIQQLVTYFQSSLKEQPHLLDHAKKAAGELARIAKEVSAANSSVEPKKLKSPIKKKANPILKNINLQLRPPEWVDTGTEKPWEDVRDNILNILTYQGRRNRYCREHSQEYVRTVLAGKQIPFKKSIAPADVTSRREQIVFSKLWRYIEARVLPLAPKGIDRIVVERTAFDLLAGKPKPSQKLESARLEEIYQQGPMYGFNSVHKMLKDEFGGLCAYCGKDSDRLMECEHIQPKRDFFFDSYLNILPACPSCNAKKGKRRLGPAALAIDAESYRKYDEYLQAMKRKRPLHMLHTVKKGILKLMTDPERAWEAEQYLGLIANNFASIVQTQRGPRPFARFLYAKLSRPGHDGPGIDFCNGRHTALYRNIAYPEFVKSLDKQERGTANHALDAIILACRLPKPHELEAQGFNPSTIKSWRRNVESSAPSAGKNGIPELPRYDWCVPGFEQVDDNGYITVDMEAMKWNQRDAATYKQDPYGWSEKARLPTKRKSALELYEKLLKEKDKSKVQSEVLERIHHPGLRTAMAEGLKSDDPGPAVAAAMKEWLRQSVKNSLPKSAVSNHPVDMRRIKELEHFAHNSDASIPPTIGIKRFDTGVRGKVDVQFLDPLTGRVGRRYMAQPANRAVVLAFPATIGKADLLKPCIARVKQNFSVRTKGERVFAPLPSELETGLVFGRDRFSPKRWAKTLENWLLDCGFHSYALLTPGCVVCYKDGKQRFIRNFEKDFEKKGEVKKEYILKNVVGVRRTPFSLKIVPLKALTPSGKKR

SEQ ID NO: 8944 - protein, 940 aa, synthetic construct
  REGION 1..940: note = Synthetic
MITLGIDWGAVNVGVALVRNTESGNEPLFAGTIIINASMIKEKVEARANIRGLRRSRKTKKSRLRELRVGLQTLGVDPVTVGHIVTFCERRGYSHQDKDEKESQEESQYKVHRNKFFQSLGEELERRFQSQELREQVCKICEQVLNAKCDPQQEPRPARFDNRGVSRCAWEGCDKVTPRRENATGDAVAQQLVTYFQGALKETPSMKENVIKVSTQLNLLAKELRAAIEDEAGDQKKAIKKRARQSLEQLRDDLTESQPVTDETKKAWKYVKDGIISLLENTGGRNSYCREHSKAYIDTILKGKQPPFKKTISESDIISRREQITFGKFWRYIEARVLPLAPEGIDRIVLERTAFDMLAGSRKIINKTSDKRVEDIYQQGPMYGCINRKDMLQKEFGGLCAYCGKSSSTLIECEHILPRSQFFFDSYLNILPACPSCNAEKGSRLPGKASLRISEEAYVKYNEYLNELKAKRPLHFLHTEKKGILNLMKEPERAWEVEQYLGLIANNFAAITQSQRGPRPLARLLFSKLSPRQNNPPAICFRSGRHTSLYRTIAYPKFQKAEEKSDGGTVNHALDAILLACQLPDPTPLEARGVNVHTVGTWRRAVLSLAPKAGKEGVPIVPTYPWRVEGFEAVDNSGYIQVELATMNWNQKDSAKHKQDPYGWSDKAKKPTKRKSALALYDELVKEKEKEEVERIIQTIHHPTLRDAMLSVIDQDPVGPTVAEAMKKWLQQSVRNSIKGSTFSNHPADQARKIQLENFANNNISPVPKIIGIKCFDIGVQGKIDLERLDSHTGKTGHRYMAAPANQAMILAYPRLKNGELDFTKPYTAGVRQNSALKTEDKKFLSKPPELENGLIWGFKAPSNQVWKKKLEAYLLDCGFHSYAMLTPCCVIRYKDGKEKFIRNFDKSKDFKKRILTNVVGVRRSPFSDRLTLLKQLTPN

SEQ ID NO: 8945 - protein, 887 aa, synthetic construct
  REGION 1..887: note = Synthetic
MITLAIDYGASNVGIALVRNTEAGNEPLFAGTLILDARELKEKVETRAGIRGLRRTRKTKNRRLRELGESLSDLGIERDKVARIVRFSNRRGYKSLFSDPNETEKVDEAESAYRCTREQFFHQLEQELQEILSDREAYEKALSVCERILNRKGDRYAEIRLIRIDNRGASRSAWAGCNKVTPRRDNATDDAIAQQLVTYFQSAIKTEPHKLEMLNQTVCELDSISKNLRGAIANNDDFSKKILRRRARKSLRNLRAELPSTEPEDVSDDAWKYVEKGILNILENSGGRNRYCREHSKSCVEKVLEGKPPEFKTTIADADIISRREQIAFSKLWRYIEARLLPLAPKGIDRIVVERTAFDLLAGKRKKIREASSEGVENIYQYGPMYGFSNVKEMLRKEFGGLCAYCGNPSDTLMDRDHILPRRDFFFDSYLNILPACPSCNAEKSASLPSQVSLRISEEAYVRYEQYLTELASKRPWHFLHTEKKGILKLMKDPNRSWEVEKYLGLIANNFASIVQTQRGPRPFARYLYSKLSARQNKPPKIVFKSGRHTALYRSAAYPLFSKALEKQQNDGNGKPVNHALDAILLACRLPASEPLEARGLNLHTLGTWRRAVMAKAPLAGEDGIPVLPDPKQYVQGFESIDANGYVTVEMGMMNWNQKDSGTHKQDPYGWSEKEQKPTKRVAAKSLFDELRNDKSKKKPDELIKRIYHTALRSAVEKAFGASQDRLAAAEALKKWLRESVRNSLSSSSFSRHPSDMRRKQDLEKFAHEDGGDIPIVIGIKCLDKGVKGKIDAERLDRQTGKTIHRYMTQPANRGMIIAYPSTRSGQCDRGKPCTAGIRQNYSLKTEDKTIFKPKSELIERGVVWGDKTDSLKALETNFSRALEQYL

SEQ ID NO: 8946 - protein, 957 aa, synthetic construct
  REGION 1..957: note = Synthetic
MITLAIDYGASNVGIALVRNTEAGNEPLFAGTVILDARKLKEKVETRAGIRGLRRTRKTKNRRLRELGEALSGLGMEGDKVARIVRFSNRRGYKSLFSDPNETEKVDEAESAYRCTREQFFHQLEQELQEILSDREACDKALSVCERVLNRKGDRYAEIRLIRIDNRGASRCAWAGCNKVTPRRDNATDDAIAQQLVTYFQSAIKTEPHKLEMLNQTVCELDSISKNLRGAIANNDDSSKKILRRRARKSLRNLRAELPSTDPEDVSGDAWKYVEKGILNILENSGGRNRYCREHSKSYVEKVLEGKPPEFKSTIADSDIISRREQIAFSKLWRYIEARLLPLAPKGIDRIVVERTAFDLLAGKRKKIRDASSEGVENIYQYGPMYGFPNEKEMLRKEFGGLCAYCGNPSDTLMDRDHILPRRDFFFDSYLNTLPACPTCNSEKSASLPSQVSLRISEDAYSMYKQYLTELASKRPLHFLHTEKKGILNLMRDPARSWEVEKYLSLIANNFASIVQTQRGPRPFARYLYSKLSTRQNKPPKIVFRSGRHTALYRGVAYPLFSKALEKEQNDLNGKPVNHALDAILLACKLPDSRPLEARGLNLHTLGTWRRAVMAKAPTAGEDGIPTLADQKHYVQGFESTDANGYVTVEMGMMNWNQKDSGTHKQDPYGWSGEKQQPTKRVAAKSLFDELRNDKSKKKPDELIKRIYHPALRAAVEKAFGASQDRLAAAEALKKWLRDSVRNSLSSSSFSRHPSDMRRKQDLEKFAHEDGGDIPIVIGVKCLDKGVKGKIDAERLDRQTGKTSHRYMTAPANLGMIVAYPRVRSGEPDKRKPCTAGIRQNYALKTEDTRFASKPPELERGVVWGNNRGSLKDLESKFEKALEKYLAECGFHSYCLLTAGCVACYEDGTQKFVRNFDQEKGFKKTTQNLKNIRGVRRSPYSKRVVPLKVLTEVPAKE

SEQ ID NO: 8947 - protein, 955 aa, synthetic construct
  REGION 1..955: note = Synthetic
MITLAIDYGASNVGIALVRNTEAGNEPLFAGTVILDARKLKEKVETRAGIRGLRRTRKTKNRRLRELGEALSGLGMEGDKVARIVRFSNRRGYKSLFSDPNETEKVDEAESAYRCTREQFFHQLEQELQEILSDREACDKALSVCERILNRKGDRYAEIRLIRIDNRGASRCAWGDCNKVTPRRDNATDDAIAQQLVTYFQSAIKTEPHKLEMLNQTVCELDSISKNLRGAIANNDDSSKKILRRRARKSLRNLRAELPSTEPEDVSGDAWKYVEKGILNILENSGGRNRYCREHSKSYVEKVLEGKPPEFKSTIADSDIISRREQIAFSKLWRYIEARLLPLAPKGIDRIVVERTAFDLLAGKRKKIRDASSEGVENIYQYGPMYGFPNEKEMLRKEFGGLCAYCGNPSDTLMDRDHILPRRDFFFDSYLNTLPACPTCNSEKSASLPSQVSLRISEDAYSMYKQYLTELASKRPLHFLHTEKKGILNLMRDPARSWEVEKYLSLIANNFASIVQTQRGPRPFARYLYSKLSTRQNKPPKIVFRSGRHTALYRGVAYPLFSKVLEKEQNDLNGKPVNHALDAILLACKLPDSRPLEARGLNLHTLGTWRRAVMAKAPTAGEDGIPTLADQKHYVQGFESTDANGYVTVEMGMMNWNQKDSGTHKQDPYGWSEEKQQPTKRVAAKSLFDELRNDKSKKKPDELIKRIYHPALRAAVEKAFGASQDRLAAAEALKKWLRDSVRNSLSSSSFSRHPSDMRRKQDLEKFAHEDGGDIPIVIGIKCLDKGVEGKIDAERLDKQTGKTGHRYMTDPANRGMILAYPPTPSGEVDKRKPCTAGIRQNYALKTEDTRFASKPPELERGVVWGNNRGSLKDLESKFEKALEKYLGECGFHSYSLLTAGCVVCYEDGTQRFIRNFDKSKDFKKAILKNIDGVRRTPFSKRVLPLKVLTEAPAKE

SEQ ID NO: 8948 - protein, 948 aa, synthetic construct
  REGION 1..948: note = Synthetic
MITLGIDYGASNIGIALVRNTESGNEPLFAGTIKIDVRDLKDKVETRASIRRVRRTRKTKKRRLRNLASQLAAISLDKNTIDHIVRFSRRRGYKSLFDEGKIHDSEFSSENELTYRFSREDFFLSLEEELHHLILDPEIRAKAIAICEQVLNKEGDRQKEVRLIRIDNRGVSRCAWEGCTKVTPRTDNALHDPIAQQLYTVFQKSLLCNADQISNLKTALAELHVLAKRIRAAPAEKPAKERKTLRAKTRKILRSLKEKFYNVDGSLLDEDQGWSYIEKGILNIMEKGSGRNRYCQKHSKEYIETILKGQAVPFKKTIADSDIVSRREQIVYQKLWRYIEARVVPLADGHIGKIVVERSAFDLLAGARKTIRNSSDKYIEDLYQQGPMYGFKSRREMLAAEFDGLCVYCGKKSSSLMDHDHILPHADFFFDGYLNILPACSQCNSALKGKRSLTASSLQIVPEAYEAYSNYLKKKYSSRPPHFLHTVKKGILNLMQDKSRLWEAEQYLSLIARQYAQIVQTQRSPRPFARYLYTRLVKLQGTGPAIQFQNGRHTALYRTVAYPEFDKQKEKLEGKTSNHALDALVLASALPSIYSIEAINIPLSIVKSWTVKVKNMAPSANNGAGIPTIPRNNSFVKGFEHVDPHGYVEVEMRSMVWNQKDRSTHKQDPYGEGSSEKYGKCPTKRRAAVDLCNHFKTEKSDVKIEDLVERIHHTALRKTIKKQMEPHNKGESASNALRKWLQESVQKSLPYSSFSNNPGDTARQKELRQFASSDETPIPTVIGVKMFDTGVRGKVDLERIDRHKQSVCHRYMTDPPNTAVIIAYPSKSNARDGSKPCCLFKRQNGSIKPEALSIFEELPSCLSVGKKLGHMIKPGASNIKAVEQYLGRCGFHSYAILTPGCVIHYEDGSLWFVRNFDQSNEFKKSRLRNIANIRRHPYSLRMIPLGTL

SEQ ID NO: 8949 - protein, 947 aa, synthetic construct
  REGION 1..947: note = Synthetic
MFTLGVDYGASSVGLALVRTDEKGLNIPLFAGTIRLDARWLKEKVETRAGIRRLRRTKKTKRHRLRQLEQSLAQIGLGAEQIQSIVRFSNRRGYKSLFDDGITDDDHDEAELTYRFTREEFFKALSIELQSLIPDLVQRQKALSACEMILNRQGLPSREIRQIKIDNRGASRCAWEGCSRVTPRSDNALREVLSQQLYTVFQSALKGNPVLCQKVETATHELHELAKRLRNASGEAASSEKKILRKKARTILRALKELLYTPADGVGDADKAWKYIETGIMNIMESRLGRNRYCREHSREYIQTICSGKPIPFKQTISDSDIISRREQIAYAKLWRYIEARILPLAPAEGIDRIVVERTAFDLLAGSWKTIQGTTDQFKEEMYQHGPMYGFESIPDMLKEEFGGLCAYCGQSSNTLIDVDHILPHADFLFDSYLNILPACPKCNSDLKGDRSISDASLVIHPDAYKAYSDYLKKKFSKRPMHYFHSIKKGVLNLMQDVNRLWEAEKYLSLIARQFAQIVQSQRGPRPFARYLSTKLAVKQGEVPEIRFRNGRHTALYRRVAYPDFQKQAEKKEGNVLNHALDAILLASELPDLYPVESLNLPLWQLKNWVTKVRSRAPKSGDTGIPVCPGGLQYVDGFETLHPGGYVEVELRSMRWNQKDSMTHKQDPYGFSEKTELPTKRGSAFDLYTELKKEKNSSKVKSRIALIHHPALRKILSESLQSDTPGPSAAEALKAWLRISVRNSLAYSPFSNHSGDQARKSELERFAVQEDCPIPTVIGIKMFNIGVRGTIDLKRLDRQTGGIGHRYMTYPSNKGVIVAYPKRGDGKPDLNRPCCIYHKQDLSIAPEKMSIFRPPPPMLSDGVILGGKPDDKEDRRRALEKYLSDCGFHSYICLTPGCTIRYKDGNEWFVRNFDSSEGFKKGRLKGIISTRRTPFVDSLTPLKILSQ

SEQ ID NO: 8950 - protein, 869 aa, synthetic construct
  REGION 1..869: note = Synthetic
MVTLGVDYGASSVGLALVRSDEKGHNIPLFAGTIRLDARWLKEKVETRAGIRRLRRTKKTKIHRLRQLEQSLAQIGLGAEQIHSIVRFSNRRGYKSLFDDGVTDSDHDEAELTYRFTREEFFKALSIELQSLIPDLIQRQKALSACEVILNRQGLPSREIRQIKIDNRGASRCAWEGCSRVTPRSDNALGEVLSQQLYTLFQSTLKGNPDLCQKVETATHELHELAKRLRHASGESASSEKKILRKKARTILRALKELLYTPADGVGDAEKAWKYIETGMMNIMETRLGRNRYCREHSRENIQTICSGKPIPFKQTISDSDIISRREQIAYAKLWRYIEARILPLAPAEGIDRVVVERTAFDLLAGSWKTIQGTTDQFKEEMYQHGPMYGFESVPDMLKEEFGGLCAYCGQSSNTLIDVDHILPHADFLFDSYLNILPACPKCNSDLKRDRSISDLSLAIHPDAYKAYSDYLKKKFSTRPMHFFHSIKKGVLNLMQDVNRLWEAERYLSLIARQFAQIVQSQRGPRPFARYLSTKLAVKQGEAPEIRFRNGRHTALYRRVAYPDFQKQAEKKEGNVLNHALDAILLASELPDLYPVESLNLPLWQLKNWVAKVRSRAPKAGDEGIPVCPGGPQYVDGFETVHLGGYVEVELRSMLWNQKDSMTHKQDPYGFSEKTGMPTKRTSAVDLHAELKKEKNLSKVKSRIALIHHPALRNALQESLSSDTPGPSAAEALKAWLRISVRNSLAHSRFSNHPGDQARRSELEKFATQEDCPIPTVIGAKMSSMGVRGKIDLRRLDRQTGGIGHRYMTQPPNKGVIVAYPKREDGKPDLTRPCLVYHKQDLSVSSENMRIFKPLPPILSDGVILGKKI

SEQ ID NO: 8951 - protein, 954 aa, synthetic construct
  REGION 1..954: note = Synthetic
MPSTLAIDFGSKYIGLALVRNEEDGRNTPLFAGTLKYDKFFLNKKVQPRAAIRRVRRTRKAKKTRLKRLYTAFLALRLPREQIPPIIRFCARRGYKSLWETNEKSGGESKGNDNIVYHYGREEFFAALKTKLEDSLSEENARDSLSACEQILNCHGDPKLEIRPVRIENRGVSRCAWDGCNKVTPRLSNALQDPLAHVVFTVYKERIAKEPQLQAAIEAMLDRVADLGKRYHSVSGADPVAEQKVLMKRIQAEFAILKRWLAASPDNEDQVSKWKYIKINLKSLITRQEGRNRFCREHSAEYVQHLLAKKPIQFKETLIERDIASRREEILFQKLWRYIEARLLSLVPNHIDRIVVERTAFDLLTGTQKQRQKMTEKAFEEMYQRGPRYGYTNDLEMLKQEFAGLCAYCGRLSGRLTEREHILPQKDFFFDSYVNIVPACDTCNSSLKGKLSGGAVGLRIHDAAYEAYSGYLRSKFKTNPPHIYQRIKKGILNLMRQPDRVWEAEDYFTLISNQLAETVQSQRTPLPLARYIGGKLRKVQVQSPKIEFRSGRHTEIWRRALYPEFDKLRDSEEGGLLNYALAALIMASDLPSVSALKARHLRLKDWNEWKANVLTRAPRAASSGIPHIKLPFTPVPGFEEIIPGNYLILDLALFNWNCKDRGTHKQNPFGWCGPMNCPSKRKNAAELVAEFSRIDNILETADIKREKAYKLINLVAHPNLRAHLFKAVNCETPGKAAVEALMEWLRVSVKNTLPHSPMSNHPGDRARHYDLCKFSEGGAVPSIIGIRRLFPDRAGNVDLCRAGGKNDGITQRYQTDPSNIGYVLAYASKEGIVDRKNPIILEIRQSGELRIRLGKKYFSESGAEPLLRGRILGQGNEIDSNKWSQALKTKLARNGLVEYGIVTPGCVLKYFNNEEFFLRNFSHDYGFKNSILKNVVGIKRTPLDQKFRNLISLS

SEQ ID NO: 8952 - protein, 716 aa, synthetic construct
  REGION 1..716: note = Synthetic
MPSTLAIDFGSKYIGLALVRNEEDGRNTPLFAGTLKYDKFFLNKKVQPRAAIRRVRRTRKAKKTRLKRLYTAFLALRLPREQIPPIIRFCARRGYKSLWETDEKSGGESKGNDNIVYHYGREEFFAALKTKLEDSLSEENARDSLSVCEQILNCHGDPKLEIRPVRIENRGVSRCAWDGCNKVTPRLSNALQDPLAHVVFTVYKERIAKEPQLQAAIEAMLDRVADLGKRYHSVSGADPVAEQKVLMKRIQAEFAILKRWLAASPDNEDQVSKWKYIKINLKSLITRQEGRNRFCREHSAEYVQHLLAKKPIQFKETLIERDIASRREEILFQKLWRYIEARLLTLVPNHIDRIIVERTAFDLLTGTQKQRQKMTEKAFEEMYQRGPRYGYTNDLEMLKQEFAGLCAYCGRLSGRLTEREHILPQKDFFFDSYVNIVPACDTCNSSLKGKLSGGAVGLRIHDAAYEAYSGYLRSKFKTNPPHIYQRIKKGILNLMRQPDRVWEAEDYLTLISNQLAETVQSQRTPLPLARYIGGKLRKVQVQSPKIEFRSGRHTEIWRRALYPEFDKLRDSEEGGLLNYALAALIMASDLPSVSALKARHLRLKDWNEWKANVLTRAPRAASSGIPHIKLPFTPVPGFEEIIPGNYLILDLALFNWNCKDRGTHKQNPFGWCGPMNCPSKRKNAAELVAEFSRIDNILETADIKREKTYKLINLVA

SEQ ID NO: 8953 - protein, 956 aa, synthetic construct
  REGION 1..956: note = Synthetic
LGRVTLAIDFGSTHIGLALVRNQNGQNEPLFAGTISYKQKVLKDKSVDRAQLRRLRRTRKTKHTRLRRLEAGLRSCGLNEAAIGPLVGFCRRRGYKNLFKEYEEEERRGKQQDETIDSREFGYREDFFKALEVKLDQLVPEDKRASARAVCERVLNLAGDRRREIRPLRFDNRGKSWCAWEGCDRVPPRRKNAPRDALAQFVYTVIDLDYVKEAPESEAKLEDMLDAVAVLGKRHRNANGKDKQVVDHERKVLKARITKEIKQIRELLKDEPDEDREKKRWSTVKGNIENLLLKSRGRNRYCRQHSAEHVQHLREGQPVPFKASLTERDLVSRREEMLYQKLWRYIEARLLPLAPEGIDRLVVERVAFDLLAGTFKQRQRVGDQTLEAMYQQGPRYRPFPQRPFKNDLEMLRIEFEGRCAYCGQESAELTEVDHILPRSEFFFDSYLNIVPACPTCNREAKGKASPTASGMSIAPEAYDAYSRYVKSKRPPHLLHAEKKGILKLMKRDDEGKARTWEAEKHLTFLANKFAVKTQTQRSPRPMARFLAERIGRPLGQAPKVRFHNGRHTAIWRKAAYPGFDKYREKEEGGVINHALDALILACDLPDITRLEHMGLTVSDIDSWIEAVRDRPPEADQDGLPLVPKPKFAVDGFEEVLPGNFVHVDLGCFNWNRKNTAVQRQGIYGWSKRQDDPTIRKPAADWSNELKAAKKPEKVEAIIKSVAHPNLRRTLEEAHARDKTGEAVAKALIEWLRKAIKPTLADDGFSSHPANQRIKRGLIKFVESQDENIPVFIGVKRFSPDHKEQKYLSRADKTGRIIHRYMADPAYRAIIVGYEAGNGKVQRDTPLTCIVRQNGEVVPRLKKMGEVPDGPLKGRAWGEPAPKKEEWTAALHDYLAKAGVVEYAVVTQGCVLRHENGGERYLRNFSGDYGFSWGLLKGVSSVRRSPLTARAVANTKV

SEQ ID NO: 8954 - protein, 732 aa, synthetic construct
  REGION 1..732: note = Synthetic
LKTTLAIDFGSRNIGIALVENSDDRDIPLFAGTFTYDPIQLKRKLNSRPQLRRLRRTRKTKRTRLRRLAHGLRGIGLEETAIDHLVTFCRRRGWKSLFGETSFSDSEKSDSKNEEILFRCSREEFFTALEDIIHQRVPERKRHQALLICESILNRDGNPHREVRKLRIDNRGPSRCAWEGCDRVTPRRENAIKDALAQFVYTIIDREKVAGDRGLQEKLDQTLITLGNLGKRLRNAGGHDPLKNRKEMAEAERKVLRKKIRDELKLVKELSNPESWKENSKNIMNILKESRGRNRYCRIHSSKFVQYMMAGKPIPFKTSLKERDIVSRREEVLFQRIWRYIEARILPLAPNGIDRLVVERVAFDLLAGKRKQRLAVGDSKLEQMYQQGPRYGFKSTMEMLKTEFGGLCVYCGKSSGDLVEREHILPKSNFIFDSYLNLVPSCPACNRQLKARRSPGQAGLKIHPDAFEAYSKYVKGMKPPHHLHTVKKGILKLMTDVNRAWEAEKYLALIAKNYGDITGAQRGPRPLARYLSEKLSEKYHKSPKVDFANGRHTALLREIAYPDFDKHKEKAEGGKINHALDALVLACDLPSPAALEGMNLPVRLMKSWVNKVRKKAPAPNQEGIPRLPVCNQVVDGFEVIHNNNYVEGNLAFFNWNRKNTAIHRQDIYGWNDYSNNPTRRTAAAQLFTDLVSADKEKALEARRKKVEKIVDNIIHPQLKAALMCEIKDGSSD

SEQ ID NO: 8955 - protein, 835 aa, synthetic construct
  REGION 1..835: note = Synthetic
MPSVTTLAIDFGSKYIGIALVRTEGTTNTPLLAGTIKYDRYSLSKKTEPRVQLRRLRRTRKTKKARLRRLEHGLVALGLETHTVNYLLNFCKRRGYKSLFDESRELGAIDKDEEETVFRFSREEFFKALEKELSACLPEEKRSQTLALCEHVLNRDGDRFKEVRLIRFDNRGSSRCAWDGCNCVSPRRDNALRDALAQFVFTVYAQRLREDQDLLGQFNVMLDKLEKLGKRLRNINGADPKAERKALLKKIGEELKLLKGLVGVDPGTEEGESNSGEAWTHIRRNLMNLLEKSGGRNRFCRGHSAEYIQHLLSGTQIPFKRTMTEKDLVSRREEILLQKLWRYIEARVLPLAPQGINRVVVERAAFDILAGTMKQRQEVMNSDYLEEMYQQGPRYGFKGDLEMFKAEFAGRCAYCGKPCQEMMESEHILPQADFFFDSYLNKVPACIPCNRQKSKLAPGAAGMKIHEDAYLAYEHYLKEKFHSKPPHLFHTIKKGILKLLTNRERVYEAERLLSLIAENLGHIVETQRGPRPLARFLSEKLRKHSGRIPEVAFRNGRHVMLWRRAAYPEFDKAGEKATGGIVNHALDALLMASVLPDPKVLEARHLPPWIISGWADKVRAAAPQAGPKGLPQMPNPTSAVTVFETVLPGNFIETDLGLLNWNRKDSGVQRQGAYGWDDRRDMPVQRTSAAGMADTLRKADKKKTPAERQGEVKKEVAVVVHPHLRPELEKANVGEKPGEATAAALTAWLRKAIKGNLKKTQFSPHPADQERAKALQEFVAGSTDIIPPVIGIRVYCPNTKANTDLIRVQTHSDRPIHHYVADPANRGIIVAYAGR

SEQ ID NO: 8956 - protein, 957 aa, synthetic construct
  REGION 1..957: note = Synthetic
MASTTTLAVDFGAKYIGLALVRNQDGKNVPLFAFTLAYDRFTLSKKAEPRVQMRRMRRTKKSKKARLRWLEAGLLTLGLDQETVDSLVRFCRRRGYKSLFDEPEEPGRKKDKEEEEVFRYSREEFFQALEKQVEATVPEDKRVPALYLCEHVLNREGDRFKEVRLIRIDNRGVSRCAWDGCNGGAPRRDNALKDALAQVVFTVYAQHVRDNPEIYQELQGMLERVAELGKRLRHAAGPRPEVEKKILRKRIGQELKVLKGLSGLDEEMPEETVEPREAWAYIRRGLMNLIERSGGRNRFCHQHSEQYVSHLLEGKPIPFKKSLTEADITSRREEILFQKLWRYIEARVLPLAPKGVDRVVVERTAFDLLAGTRKQRLAISDKELEAMYQEGPRHGFKDDLEMLREEFGGLCAYCGQPSSGILEREHILPQADFFFDSYLNKVPACIDCNRLWKGKASPLAAGLVVHESAFQAYSRYLSAKFAVKNRPPHVFHTIKKGILKLMTQKERLPDAERLLAIIADNLGTVVEAQRGPRPLARYLCQKLGQRYGRVLQVAFRSGRHTSIWRQAAYPEFDKAAEKTSGGTLNHALDALIMACDLPDITFLEARNLAPWTLGAWVENVQAAAPPPGENGVPALPFPAFAVPGFEEVLPGNYVQTDLARFNWNRRDSRVQRQDAYGWDGWEDVPAKRVSAADLAASLRAADKKTSSADRQVEVKKEIEVVVHPRLRQALEKANAGDTPGEAAAQALTRWLRKAVKGSLGNASFSSHPADQGRAGALRDFAQAVTEVIPAVIGVRIRYPWLKANMDLHRVDRRTGKVVHRYVADPANRGFIVAYMAKDAQVQRDKPLTLELRQSGAVAPGVKKLGEVPPGPLQGRAFGEPRVARDEWDIALKAYLQAAGIIEYTFVSQGYVIHYEDGSQRYIRNFSSSYGFKKSLFKGIIGVRHSPLAKRVTPNTRI

SEQ ID NO: 8957 - protein, 585 aa, synthetic construct
  REGION 1..585: note = Synthetic
VTSAVTLSIDFGYKNIGLALVRNQEGVNTPLFAGTLQYDPFALSKKVGPRAQLRRGRRTRKTKRYRLNSLKKALSNLNLSEEGIHQLVNFCRRRGYSSLFELRAVSTDRETQPEVEIVFRFSREEFFAALEKEIERLLPEEQRGSVLAICEKILNRAGEPSQEIRPLRIDNRGASRCAWDGCDNVPPRRDNALRDPLSQLVHTVFASSLRGDTALQQEVSGMLDRIAELGKRLRHRGGPDPDKERKALKAEISQELKLLKKLYGLNPDLTEETATPWTKIRQNITNLIEQTGGRNRFCRYHSSQYVAHFMEGKPIPFKATLTERDLVSRREEILFQKIWRYIEARILPLAPDGINHVIVERTAIDLLAGSRKQRQAIMNKEALEEMYQRGPRYGFTDDLDMLRGEFGGLCAYCGQEHAELVERDHLLPRSKFFFDSYLNIVPACPNCNRSQKQAASPEQSALHIHENAYDAYSRYYDSIRENPPHVFHTIKKGILNLMRDPTRTWEVERFLSLIANQFAQVTGTQRGPRPLARYLSGKIYQKYGEKPRIGFVNGRHTALWRKAAYPDFDKFRDKAEGGVVNHALD

SEQ ID NO: 8958 - protein, 585 aa, synthetic construct
  REGION 1..585: note = Synthetic
MVTLSIDFGYKNIGLALVRNQEGVNTPLFAGTLQYDPFALSKKVGPRAQLRRGRRTRKTKRYRLNSLKKALSNLNLSEEGIHQLVNFCRRRGYSSLFEPRAVSTDRETQPEEEIVFRFSREEFFAALEKEIERLLPEEQRGSVLAICEKILNRAGEPSQEIRPLRIDNRGASRCAWDGCDNVPPRRDNALRDPLSQLVHTVFASSLRGDTALQQEVSGMLDRIAELGKRLRHRGGPDPDKERKALKAEISQELKLLKKLYGLNPDLTEETATPWTKIRQNITNLIEQTGGRNRFCRYHSSQYVAHFMEGKPIPFKATLTERDLVSRREEILFQKIWRYIEARILPLAPDGINHVIVERTAIDLLAGSRKQRQDIMNKEALEEMYQRGPRYGFTDDLDMLRGEFGGLCAYCGQEHAELVERDHLLPRSKFFFDSYLNIVPACPNCNRSQKQAASPEQSALHIHENAYDAYSRYYDSIRENPPHVFHTIKKGILNLMRDPTRTWEVERFLSLIANQFAQVTGTQRGPRPLARYLSGKIYQKYGEKPRIGFVNGRHTALWRKAAYPDFDKFRDKAEGGVVNHALDALL

SEQ ID NO: 8959 - protein, 613 aa, synthetic construct
  REGION 1..613: note = Synthetic
MQSRVTLSIDFGYKNIGLALVRNQEGINTPLFAGTLLYDPFLLSKKVGPRAELRRGRRTRKTKRHRLNLLKKNLFATNLPEGVVQELITFCRRRGYSSLFDVKESPETGKVDPKEEIVFRFSREEFFRALEIQIERLVPEEKRGLVLGLCETILNRAGEPSKEIRPIRINNRGASRCAWDGCENVTPRRDNALRDPLSQFVHTVFAASLRSDAALQQEVARMLDRIAELGKRLRHRGGPNPDKERKALRARISEELKLLKKLYGLSPDLTEEDATPWARIRRNITNLIEQTGGRNRFCRYHSNQYVTYFMEGKPIPFKATLSERDLVSRREEILFQKIWRYIEARLLNLAPDGIDRVIVERTAIDLLGGSRKQRQGIMNKEALEEMYQYGPRYGFNDDLEMLRAEFDGLCVYCGKPNTELLERDHLLPQSKFFFDSYLNKVPACPPCNRTLKQAASPGGAALRIDERAYDAYSKYVASKFKEKPPHLFHTIKKGVLNLMREPGRIWEAERYLNLIANQFAQVAGTQRGPRPLARYLSGKIYQRFEEKPKIGFVNGRHTAVWRRAAYPEFDKFRDKAEGGVINHALDALLMACDLPDLTALEARNLQPGLMSWW

SEQ ID NO: 8960 - protein, 954 aa, synthetic construct
  REGION 1..954: note = Synthetic
MQSRVTLSIDFGYKNIGVALVRDQDGINTPLFAGTLLYDPFQLSTKVGPRAELRRGRRTRKTKKHRLNLLKKKLFDTNLPEEVVQGLITFCRRRGYSSLFDVKEPLKTEKVDSKEEIVFRFTREEFFGALEKQIERLVPDEKRGLVLGLCENILNRAGEPSKEIRPLRINNRGASRCAWDGCENVTPRRDNALRDPLSQFIHTVFAASLRSDTALQQEVGRMLDRIAELGKRLRHRGGTNPDKERKALKTEISEELKLLKKLYGLSPDLTEEDATPWARIRRNIINLIEQTGGRNRFCRYHSSQYVTHFMEGKPIPFKATLSERDLVSRREEILFQKIWRYIEARILPLAPDGIDRVIVERIAIDLLGGSRKQRQGIMNKEALEEMYQYGPRYGFSDDLEMLKTEFGGLCVYCGRQNAELIERDHLLPQSKFFFDSYLNIVPACPPCNRNLKQAASPGEAAMRIHEEAYDAYSKYISSKFRDKPPHLFHTIKKGVLNLMREPGRIWEVERYLNLIANQFAQVAGTQRGPRPLARYLSGKIYKRFGQKPQIGFVNGRHTALWRKAAYPEFDKFRDKAEGGVINHALDALLMACDLPDLTRLEARNLQPGLMSWWVDKVRKAAPPEGQDGIPVISEPCFAVAGFEKVLPGNYIEAELAKMNWNHKDTQVQRQGAYGWSKKEDLPVQRVTAAGLADELRKADKKTSPESRRAEVDKIVNVIVHPQLHQTLKMANIGDTPGLSAAEALALWLRKTIRGNLSKARFSSHPADQSRSKMLQDFINGQSNVIPAVIGVQILYPWLKSNMDLNRVDPKSGRLVHRYIADPANVAYIVAYRRDNGKVKRDRPLTLKWRQSGAVIPGVKLFGDVPEGPLKGRSLGEKAIEQTAWKNALHQYLSKAGIAEYNFVSQGNVVVYEDGSQLYIRNFSGSYGFRKSWFKGIKAVRPSPLTQRLIPNAMV

SEQ ID NO: 8961 - protein, 1121 aa, synthetic construct
  REGION 1..1121: note = Synthetic
MDKIRIGIDFGYKYTGVSVLNSDNKILDYKVITHRTDISKTLLNRRTNRSSHRRKHTQNVRLRNFYALLKGMGIEPQQQNHNFIGSKLYAMAHRRGWDYSSLIELLIDDKKGITSTVRTIDKLLIDEFNAPHNVEEKIKKGKKYTIKKINTTCLGELAEYQKQIKDNQKTIDRSKETEQKKTLANRNKQEAELKYGELHYKLDNAGLDEIKEYIEARLKAVGIKQTTEALDYTLVLLGLNIGEKLHKAGKLYTPHKNRHRNELIKDLKEKMQVAFKELEAIQIAEQFASKQNTKIELIQEEWLKNAVAILDPNNPQRGNNNANRKKNNKDIRPSRFENRHTGKCPAKLENGKRCNCNLPKKSRADIRALQFEIEAKQMNIETDNGTRKLIDDELTVLINCVDFENAELVNQGDDWNAFFDQHKTPRVKGDARGKKDILKDMAIGSQAGRSGLCKTHLQEKLTLLNSEETQGKDWGRLHQERLLSIYSNDAPPSIRQKIEVVISTLKQMLKQQKYDIKNLPIEHIGIETARFDISALAQNEGKRLKNKKDYQTKTNISIQDIKDEQGGKCIYCGNNLGFATIEHIFAKSLGGSSKALNRAAAHDICNINKGNETTFQIDKNVLQTLKENNLKKYNFIQKGIKNNWHKVDTSLAGAQHTMFGAKLLKGSLIDAFALEQLSELETQQIFPKVKPRETSFLRRQWFPLIDKQKSVIRYKKKDNIEVMEITINKTTPTPLKIKWSKKIDDIIIKLDKPEKLKSWIKHQTVNRETTITIDESHQFKQGDESILSYRFNAFSETTGDKQYKQIHIIIKPAKNDGVYEFHHAIDAIVSAVNIDWDALNRINTEFMPNDKNYWRKFNKAVGDVRPSIKLKSIKINGKNDFIAPNKNLFLKENKQDQSRIKCSKTDTQALSLKNDKITQRKMLYKIKENGVKNIQSNRIKSLMVEAFDKIKIMPDDEKNIYLSKDNTITQDYFLTLKPNHKLHPINTRSVRCLVGGTGIKQMFKIINKHNQGEHFYKATKKWGYVVVYKQNKKIISERFLDHFYVNKNNPQIPKPDNAIEIKRFKSGDKVTSTKQKGLWRISELGQSAVLVPLDITAQDIKDQTQNKIMTSYANLELQTRH

SEQ ID NO: 8962 - protein, 1121 aa, synthetic construct; identical to SEQ ID NO: 8961
  REGION 1..1121: note = Synthetic

SEQ ID NO: 8963 - protein, 998 aa, synthetic construct
  REGION 1..998: note = Synthetic
MNFNEWFNGNRLGLDFGIKGVGIAVVQGRRVLFAQSLLNLAHPSLEDRRGHRRSRRTHRSRQRRLKEFRKHCIEHGLLDPVFLAHTSDAPHPLIAGRHTPDPRWADLQAVRERLRNGHGSPEDFVRFCYDLCRRRGYTYDSVEDMVLKAVRLYRGKQPTPAKVEEKLLEEFSDACMPQDIVKHILEILDDNDYGSLIAVGSSLRGALDQAVHRDAGSRKSRTKRPRVAVEKELQDVCDKNPVFAGHQAAILKIINWQPRPMRIDNRASTMWKCSWCEERWRPRLKNLAEDKDPEIRDGLLMEAILNLRHKAARDAAESARPWWAKNIQDAVKKKGNIPTEEIRQQVLKGLKEIAPTAGRKDVLSNIRDIFKEYKLADKEVEKFADLLRPRAKEEGRSKRCRECIKLGAKAKSLEDYLRIREMVMNRKKSKQKAVGMEAWVERCVNAIRRTLFYKDPKGKLRFRYGSLQTISLEVPRYDPEEDKSSRQREEDNRQRRAWPFLKQRWWQQGGRDGKKAACIYCGEASFNPREETLSDGSIKYSLPAGFQREHIFPRGGSYNGQDLQINLVVACEKCNDAKGEKTPFVWKDTIPNGWDKFKERVKSSNLTAPTKELLLSELATFPDPLDLLAKTGAVRKVLADRLKTLFADAGIDLTDQKIVFVDGWTTQLARRSWNSVVDAKGNKIENFPRKDRSDPANHAQDAVLAAAVPPHYLRRRGEWLVRERTDILSTGRPAPDWAPHWPEYCAKTKRRPLSMDLTRRRYSWHAQQWDDSIFRRDKDEKFLIRKKLDKVNPDRLPPSLGWAKEQILRVRGEIGKIKKRTDIRGREKEEEIEKIYTSVLDTAGRTVRGLTVYADDVGATNSTEAPPGSKRWRKTLTSRPWVGLRQNSEDQSIQIVLPSAPDAGPPADMWILRLGTIVWLKQDIQSMIDKKRHIWKRGWYRLTKIAGDGAAITVEPCDQPLPFVIKGKKKEDRDLSLRGENLKLLRYPVEVSSQPSTA

SEQ ID NO: 8964 - protein, 962 aa, synthetic construct
  REGION 1..962: note = Synthetic
MTFQEWFTSIRLGLDFGLKGVGVAIVRGSKVLYAQSLLNLGLVDIANRRGHRRSRRTHRMRQRRLRRFRKYCLRNGLPDPVPLSHTSTAPHSDLKEPHAPDSRWQDLLEIRSSLLDGKATAEEFVRFSYDLVRRRGYTYDSLEETVRRALRPKRGKPPSPADVQKNLLEEFRTTQMPASARERIEQILRDGGCGKLLEPGTDLKRTLEEAVARPSDARQPDVKRPREAVRKELEQVCRANPHFAAHEAAIWEIINWQPRPLRIDNRASTMRKCSWCGKNWRPRLLNVAQDKDSSVREGLLLEAIHNLRHKASKEQAANIRPWWHAARAKDIKKKGVSPSDETLQHVLADLKEISRTADRPEVLKTLGQIFKKYQLADIEKEKFADLLRPREKEEGRSQRCRECIKLGASATSPEDYRNIRAMVQANRQEAVSVGRLEQWLDQCVKAIRRTLFYTDPKGKTRSRYGSLSMISLEVPRYDPDEGKSAKQRLESNQLRRAWPFLRQRWHEQKGVCIYCGQRALTLVEETRADGSIRYRLPAGFEEEHIFPRNDQFQGDDRQNNKVIACDICNRSLKERLTPWHWLKKQPEHWHEFEQRVRKSLLPRSTQELLLSQEDRYPDPVALLTRSGQIRKLLPIKLQQLFREVGQELPDQAISFVDGATTQLARREWRTARDSDGNLVANFEPKDRDNPTHHAQDAALSAGIPPHYLRQVGAWLLPDRGVPKPTFAPDWASYETMKKRKPLSIDLTRRRYDWHAQQWDDTIYGRDPIGRFFVRKVISKADPNLLPEGSDWAREALASGASELTAPGGDKKVRALRVYPTDVGPTSMQEELPGSGRWRKTLLARAWVALRQINGQVELRLPDAREARNKPSKAEGWWTLERGNIVWLKKAEERTVGGIPHIWPQGWYRLTKIAGKGDSLTFAPCDQALPYSVSKKDGKEKKEYGDLTLKTNDLRKLRWPSIK

SEQ ID NO: 8965 - protein, 951 aa, synthetic construct
  REGION 1..951: note = Synthetic
MLGSSRYLRYNLTSFEGKEPFLIMGYYKEYNKELSSKAQKEFNDQISEFNSYYKLGIDLGDKTGIAIVKDNKIILAKTLIDLHPKKLDERREARRNRRTRLSRKKRLARLRSWVMRQKVGDQRLPDPYKIMHDSKYWSIYNKSNSTNKKDWIDLLTHNNSLSAEDFVRGLTIIFRKRGYLAFKYLSKLSDKELKNYLKQLKPPISNDEYEAVLSEIAERFKNGEIDEKEYSSFKFKLAQINKESKDFQVKQREEVKKELEDLVDLFNKSVDNKIDKERWKRELKHLLDKKVRKIRFDNRFILKCKIKGCNKNTPKKENVRDLELKMALNNTRSEFPISDEDLNSFREEVINIYEKKKAPSSAYSKDNSFKDLRKQLNKAFNTAKIKKGMREQIRVLVFEKLNGRSRFCKEHLKEFSEKQVPFDRISYGVNPAREQHDFRVLNFIEKVVFGSKFVDPSKLRYITIESPEPETERLKKGQASEKSNETLKEKLAKEIGGIDIYTGEKLKKDFETEHIFPRSRMGPSIRENEVASNLETNKEKADRTPWEWFGSDTKRWVEFEKRVNNLYKKKEISERKKEILLNKSNEYPGLNPTDLSRVPSTLSDFAESIRKMFVKYGYEEPQTLIQKGKPIIQVVRGRDTQALRWRWHALDNDIIPDKDRKSSFNHAEDAVIAACIPPYYLRQKIFREEAKLKRKVSNKEKEVTRPDMPTKKIAPNWSEFVKNKKEPIIEIVGKIKPSWKNRIMDQTFYKSIKKPVKIGKTSFIQLKEVGKTFYLSSKNDNNKVSLWVHEKKDSKRTLKKKSKGGLIVYIKPKDGPERMVQIKPGTQSILIYKDKEGKVNAVREFINPVIEMYKKGNLKFVEKENEEELLSYYNLIKNGIKFKRVRRYDLIKFDGKFYFVTKLNKTHRVTIQEESNIKAEPNKVKSSSGKEYNIKETKDLTPEKLAGLLGI

SEQ ID NO: 8966 - protein, 944 aa, synthetic construct
  REGION 1..944: note = Synthetic
MEHYKEYNKDLSLKAQKEFNDQITEFNSYYRLGIDLGDKTGVAIVKDNKIILAKTLIDFHTKKLDDRRKSRRNRRTRLSRKKRLARLRSWVMRQKVGDQRLPDPYKIMHDNKYWSIYNKSNSVNKKNWVDLLIHSNSLSADDFVRGLTIIFRKRGYLAFKYLSRLSDKEFEKYIDNLKPPISKYEYEEDLEELSSRVENGEVEEKKFEGLKNKLDKIDKESKDFQVKQREEVKNELEELVDLFAKSVDNKIDKEKWKRELNSLLDKKVRKIRFDNRFILKCKIKGCNRNTPKRENVRDFELKMALNNARSDYPISDEDLNSFRNEVIDIFQKKENLKKGELKGVTISDLRKQLNKTFNKAKIKKGIREQIRSIMFEKISGRSKFCKEHLKEFSEKPVPSDRINYGVNPAREQHDFRVLNFIDKKVFKDKLIDPSKLRYITIESPEPETERLGKGQISEKSSETLKEKLAKETDGIDIYTGEKLKKDFETEHIFPRARMGPSIRENEVASNLETNKEKADRTPWEWFGQDEKRWSEFEKRVNSLYRKKKISERKREILLNKSNEYPGLNPTDLSRIPSTLSDFVESIRDMFVKYGYEEPQTLLQKGKPIIQVVRGRDTQSLRWRWHALDSDIIPEKDRKSSFNHAEDAVIAACTPPYYLRQKILREEAKIKRKVSNKEKEVTRPDMPTKKIAPNWSEFMKTRKEPVIEVIGKVKPSWKNSIMDQTFYKYLLKPFKDNLIKIPNAKNTYKWIGVNGQTDSLSLPSKVLSISNKKVDSSKVLLVHDKDDGKRNWVSKSIGGLLVYITPKDGPKRIVQVKPATQGLLIYRNEDDKVDAVREFINPVIEMYNNGKLTFVEKENEEELLKYFNLLKKGQKFERIRRYDMITYNSKFYYVTKINKNHRVTIQEESKIKAESNKVKSSSGKEYTRKETEELSLQKLAELISI

SEQ ID NO: 8967 - protein, 871 aa, synthetic construct
  REGION 1..871: note = Synthetic
MLGSSRYLRYNLTSFEGKEPFLIMGYYKEYNKELSSKAQKEFNDQISEFNSYYKLGIDLGDKTGIAIVKGNKIILAKTLIDLHSQKLDKRREARRNRRTRLSRKKRLARLRSWVMRQKVGNQRLPDPYKIMHDNKYWSIYNKSNSANKKNWIDLLIHSNSLSADDFVRGLTIIFRKRGYLAFKYLSRLSDKEFEKYIDNLKPPISKYEYDEDLEELSSRVENGEIEEKKFEGLKNKLDKIDKESKDFQVKQREEVKKELEDLVDLFAKSVDNKIDKARWKRELNNLLDKKVRKIRFDNRFILKCKIKGCNKNTPKKEKVRDFELKMVLNNARSDYQISDEDLNSFRNEVINIFQKKENLKKGELKGVTIEDLRKQLNKTFNKAKIKKGIREQIRSIVFEKISGRSKFCKEHLKEFSEKPAPSDRINYGVNSAREQHDFRVLNFIDKKIFKDKLIDPSKLRYITIESPEPETEKLEKGQISEKSFETLKEKLAKETGGIDIYTGEKLKKDFEIEHIFPRARMGPSIRENEVASNLETNKEKADRTPWEWFGQDEKRWSEFEKRVTSLYSKKKISERKREILLNKSNEYPGLNPTELSRIPSTLSDFVESIRKMFVKYGYEEPQTLVQKGKPIIQVVRGRDTQALRWRWHALDSNIIPEKDRKSSFNHAEDAVIAACMPPYYLRQKIFREEAKIKRKVSNKEKEVTRPDMPTKKIAPNWSEFMKTRNEPVIEVIGKVKPSWKNSIMDQTFYKYLLKPFKDNLIKIPNVKNTYKWIGVNGQTDSLSLPSKVLSISNKKVDSSTVLLVHDKKGGKRNWVPKSIGGLLVYITPKDGPKRIVQVKPATQGLLIYRNEDGRVDAVREFINPVIEMYNN

SEQ ID NO: 8968 - protein, 967 aa, synthetic construct
  REGION 1..967: note = Synthetic
MLGSSRYLRYNLTSFEGKEPFLIMGYYKEYNKELSSKAQKEFNDQISEFNSYYKLGIDLGDKTGIAIVKGNKIILAKTLIDLHSQKLDKRREARRNRRTRLSRKKRLARLRSWVMRQKVGNQRLPDPYKIMHDNKYWSIYNKSNSANKKNWIDLLIHSNSLSADDFVRGLTIIFRKRGYLAFKYLSRLSDKEFEKYIDNLKPPISKYEYDEDLEELSSRVENGEIEEKKFEGLKNKLDKIDKESKDFQVKQREEVKKELEDLVDLFAKSVDNKIDKARWKRELNNLLDKKVRKIRFDNRFILKCKIKGCNKNTPKKEKVRDFELKMVLNNARSDYQISDEDLNSFRNEVINIFQKKENLKKGELKGVTIEDLRKQLNKTFNKAKIKKGIREQIRSIVFEKISGRSKFCKEHLKEFSEKPAPSDRINYGVNSAREQHDFRVLNFIDKKIFKDKLIDPSKLRYITIESPEPETEKLEKGQISEKSFETLKEKLAKETGGIDIYTGEKLKKDFEIEHIFPRARMGPSIRENEVASNLETNKEKADRTPWEWFGQDEKRWSEFEKRVNSLYSKKKISERKREILLNKSNEYPGLNPTELSRIPSTLSDFVESIRKMFVKYGYEEPQTLVQKGKPIIQVVRGRDTQALRWRWHALDSNIIPEKDRKSSFNHAEDAVIAACMPPYYLRQKIFREEAKIKRKVSNKEKEVTRPDMPTKKIAPNWSEFMKTRNEPVIEVIGKVKPSWKNSIMDQTFYKYLLKPFKDNLIKIPNVKNTYKWIGVNGQTDSLSLPSKVLSISNKKVDSSTVLLVHDKKGGKRNWVPKSIGGLLVYITPKDGPKRIVQVKPATQGLLIYRNEDGRVDAVREFINPVIEMYNNGKLAFVEKENEEELLKYFNLLEKGQKFERIRRYDMITYNSKFYYVTKINKNHRVTIQEESKIKAESDKVKSSSGKEYTRKETEELSLQKLAELISI

SEQ ID NO: 8969 - protein, 957 aa, synthetic construct
  REGION 1..957: note = Synthetic
  REGION 405..406: note = misc_feature - Xaa can be any naturally occurring amino acid
MLGSSRYLRYNLTSFEGKEPFLIMGYYKEYNKELSSKAQKEFNDQISEFNSYYKLGIDLGDKTGIAIVKGNKIILAKTLIDLHSQKLDKRREARRNRRTRLSRKKRLARLRSWVMRQKVGNQRLPDPYKIMHDNKYWSIYNKSNSANKKNWIDLLIHSNSLSADDFVRGLTIIFRKRGYLAFKYLSRLSDKEFEKYIDNLKPPISKYEYDEDLEELSSRVENGEIEEKKFEGLKNKLDKIDKESKDFQVKQREEVKKELEDLVDLFAKSVDNKIDKARWKRELNNLLDKKVRKIRFDNRFILKCKIKGCNKNTPKKEKVRDFELKMVLNNARSDYQISDEDLNSFRNEVINIFQKKENLKKGELKGVTIEDLRKQLNKTFNKAKIKKGIREQIRSIVFEKISGRXXEKPAPSDRINYGVNSAREQHDFRVLNFIDKKIFKDKLIDPSKLRYITIESPEPETEKLEKGQISEKSFETLKEKLAKETGGIDIYTGEKLKKDFEIEHIFPRARMGPSIRENEVASNLETNKEKADRTPWEWFGQDEKRWSEFEKRVNSLYSKKKISERKREILLNKSNEYPGLNPTELSRIPSTLSDFVESIRKMFVKYGYEEPQTLVQKGKPIIQVVRGRDTQALRWRWHALDSNIIPEKDRKSSFNHAEDAVIAACMPPYYLRQKIFREEAKIKRKVSNKEKEVTRPDMPTKKIAPNWSEFMKTRNEPVIEVIGKVKPSWKNSIMDQTFYKYLLKPFKDNLIKIPNVKNTYKWIGVNGQTDSLSLPSKVLSISNKKVDSSTVLLVHDKKGGKRNWVPKSIGGLLVYITPKDGPKRIVQVKPATQGLLIYRNEDGRVDAVREFINPVIEMYNNGKLAFVEKENEEELLKYFNLLEKGQKFERIRRYDMITYNSKFYYVTKINKNHRVTIQEESKIKAESDKVKSSSGKEYTRKETEELSLQKLAELISI

SEQ ID NO: 8970 - protein, 952 aa, synthetic construct
  REGION 1..952: note = Synthetic
MGIDLGKSVGFAIVKDNKVIFAHTLVDMSISNLKNRREHRRNRRSRRAREKRLAKLRSWVLRQKVDGKQLPDPYKIRNKIFENKHNLISTVINGTNTTPEAFVRSLSLIFSKRGQEIENISLEISEYTNKHLLKEVQDLLKRSVVGEEEIEVFKDELTKRYEESDEEKKKQYANIISEFEDIDKSKFKKFINRKEHKKQIEDVVSTFYRVNKINNINKGRWIKELKGLLDKPVRKVRFKNKIVIGCNICGSITPKKNKNEVRRFEYDLAVLNFLTAGRIKEEEKEEAKSYFTKIFNSTEKIRDEIKSIENLKENKEQCPVSDGELKEEQKSELEKQKKERTRQKTSITKKFKTYYSKNKLLNKKQSYVEKQINDLLYTKIRGRSRYCTKHLKSMSQGVDLEKDIHGIRRKRYDRNFIQQNHDKRVINFIEKSLFDNNDSEISKLIKLKGIKYISIEAPEPKTKRTKKGQTSKKDERKIKEKIFDKLNSTCIYTGEELNKDNLNLYELDHIFPKSRGGPNIRDNYVITTKNTNKEKGNRTPYQWIEKGKFEEFRDRVDKFFELGYINLRKKEILLYEGNEYPDNPTELARTGARVSSFIYELSDMLEKHGLDRPQTLFEKGKPIVQVVRGYDTAKLRKQWNAIKPGEIPIKDELNAFNHAEDAAIIASIPPATWRERIFRYDGKFENSEKMRPDFAPLILAPCWNTYELNRNKSIVSIISKTRYSWKKHFIDDTFYIFPNEKSRFDDIYTLNKSIPKPLNQQRLDKEHLYYHKKIDQSSNYLIRAQRGGTTVMLKPLNKPERYIQIKPIRSGVLLIKEKDKIKKFVRPIYPLIKLYESNKIDLSKLSDAEIAESLKNRYYKKYIDGFLIKQHDIFYLEKTKKHESGYFIVTKIGKKNVISIKPEKKIKTYEKSKVKNYNTNTNEIENKKKDSFSLSTDDINYIYTKFESQRAK

SEQ ID NO: 8971 - protein, 949 aa, synthetic construct
  REGION 1..949: note = Synthetic
MRDSITAPRYSSALAARIKEFNSAFKLGIDLGTKTGGVALVKDNKVLLAKTFLDYHKQTLEERRIHRRNRRSRLARRKRIARLRSWILRQKIYGKQLPDPYKIKKMQLPNGVRKGENWIDLVVSGRDLSPEAFVRAITLIFQKRGQRYEEVAKEIEEMSYKEFSTHIKALTSVTEEEFTALAAEIERRQDVVDTDKEAERYTQLSELLSKVSESKSESKDRAQRKEDLGKVVNAFCSAHRIEDKDKWCKELMKLLDRPVRHARFLNKVLIRCNICDRATPKKSRPDVRELLYFDTVRNFLKAGRVEQNPDVISYYKKIYMDAEVIRVKILNKEKLTDEDKKQKRKLASELNRYKNKEYVTDAQKKMQEQLKTLLFMKLTGRSRYCMAHLKERAAGKDVEEGLHGVVQKRHDRNIAQRNHDLRVINLIESLLFDQNKSLSDAIRKNGLMYVTIEAPEPKTKHAKKGAAVVRDPRKLKEKLFDDQNGVCIYTGLQLDKLEISKYEKDHIFPDSRDGPSIRDNLVLTTKEINSDKGDRTPWEWMHDNPEKWKAFERRVAEFYKKGRINERKRELLLNKGTEYPGDNPTELARGGARVNNFITEFNDRLKTHGVQELQTIFERNKPIVQVVRGEETQRLRRQWNALNQNFIPLKDRAMSFNHAEDAAIAASMPPKFWREQIYRTAWHFGPSGNERPDFALAELAPQWNDFFMTKGGPIIAVLGKTKYSWKHSIIDDTIYKPFSKSAYYVGIYKKPNAITSNAIKVLRPKLLNGEHTMSKNAKYYHQKIGNERFLMKSQKGGSIITVKPHDGPEKVLQISPTYECAVLTKHDGKIIVKFKPIKPLRDMYARGVIKAMDKELETSLSSMSKHAKYKELHTHDIIYLPATKKHVDGYFIITKLSAKHGIKALPESMVKVKYTQIGSENNSEVKLTKPKPEITLDSEDITNIYNFTR

SEQ ID NO: 8972 - protein, 949 aa, synthetic construct
  REGION 1..949: note = Synthetic
MRDSITAPRYSSALAARIKEFNSAFKLGIDLGTKTGGVALVKDNKVLLAKTFLDYHKQTLEERRIHRRNRRSRLARRKRIARLRSWILRQKIYGKQLPDPYKIKKMQLPNGVRKGENWIDLVVSGRDLSPEAFVRAITLIFQKRGQRYEEVAKEIEEMSYKEFSTHIKALTSVTEEEFTALAAEIERRQDVVDTDKEAERYTQLSELLSKVSESKSESKDRAQRKEDLGKVVNAFCSAHRIEDKDKWCKELMKLLDRPVRHARFLNKVLIRCNICDRATPKKSRPDVRELLYFDTVRNFLKAGRVEQNPDVISYYKKIYMDAEVIRVKILNKEKLTDEDKKQKRKLASELNRYKNKEYVTDAQKKMQEQLKTLLFMKLTGRSRYCMAHLKERAAGKDVEEGLHGVVQKRHDRNIAQRNHDLRVINLIESLLFDPNKSLSDAIRKNGLMYVTIEAPEPKTKHAKKGAAVVRDPRKLKEKLFDDQNGVCIYTGLQLDKLEISKYEKDHIFPDSRDGPSIRDNLVLTTKEINSDKGDRTPWEWMHDNPEKWKAFERRVAEFYKKGRINERKRELLLNKGTEYPGDNPTELARGGARVNNFITEFNDRLKTHGVQELQTIFERNKPIVQVVRGEETQRLRRQWNALNQNFIPLKDRAMSFNHAEDAAIAASMPPKFWREQIYRTAWHFGPSGNERPDFALAELAPQWNDFFMTKGGPIIAVLGKTKYSWKHSIIDDTIYKPFSKSAYYVGIYKKPNAITSNAIKVLRPKLLNGEHTMSKNAKYYHQKIGNERFLMKSQKGGSIITVKPHDGPEKVLQISPTYECAVLTKHDGKIIVKFKPIKPLRDMYARGVIKAMDKELETSLSSMSKHAKYKELHTHDIIYLPATKKHVDGYFIITKLSAKHGIKALPESMVKVKYTQIGSENNSEVKLTKPKPEITLDSEDITNIYNFTR

SEQ ID NO: 8973 - protein, 965 aa, synthetic construct
  REGION 1..965: note = Synthetic
MPVDVNNPTKMTDALRSKVNEFNSAFKLGIDLGTKTGGIALVKNNKVILARTFLDYHNTDVKKRRAHRRNRRSRRAKEKRLARLRSWVLRQKVNGKQLPDPYKIRNIPFHRAGEKPSNIKGKANWVSAVIDGKNTSEEAFVKALVTIFMKRGQSYDKFEIEGLNDKEFLEFLNERTAVSQEEHDELLAEFEARYNNGGYSISEYEKAREHVSKMQKNPDEKNRKYREGEIKRLVNAFCNRAGINEGDKWASDLVHILNRRVRKARFKNRILIRCNICDKPTPNKGNMEVRKLSYLDAVRNFLKSGRIDESPEIERYYLDLYNNSQSIRSKILDQTPLSASEKFEKRKFISKILPKTYCSDNPFILEKQKDVKKQIVDLLFNKLYGRSRYCKNHLGIKAEGKDVEEGRHGQIGKRHDRNVALMNHDKRVLNLLEKLLFNYDDKLTQQIKTSGIKYVSIEAPEPKTKKTKKGKTTERDPRKLKEKLFDACGGVCIYTGNMLDRMKMGEYEADHIFPESRDGPSVQDNLILTTHAINKNKNNMTPWEWLHGDDAKWQVFSDRCNEFYKKGRLTKRKLELLLNKSGEYPENNPTELAKVGARIGNFQTELIELFNKYGIESPQTLFMKGKPIIQVVRGNETQKLRRLWGTSNPGFVPPLKDRTTMFNHAEDAAIAASMPPKIWREQIYRYTSKFQDGKERPDFAIPDIAPHWGEYVENRKSPLLAVLGKTNYTWKTSIVDDTFYKKYNANSKFDKIYKQPGSNKTGPVKDDRPILLEGKHELDIKKKYYHKVVDGSRYFLESQPGGTLVEIQPKDGPKRYIQISPVFDEVILTGDAILRTPIRPLLELYASGKLDLESINNKHLKEAFKSQNDYMRNYKNAVHIRLHDIIWLGKTNTHKEGYFIITKLGQSIKMRPEEKEKTNKDIYKKIVDLSSIKIDNVSPVVKMSDLTLTKGDITFLTSSKSSSQT

SEQ ID NO: 8974 - protein, 1010 aa, synthetic construct
  REGION 1..1010: note = Synthetic
MFGSGMGSSYMVCPVIRARSHYDYGVAMYTEDAHIKMSSVLKSKIDEFNSAFKLGIDLGTKNGGVALVKDNKIILARTFLDYHDTDLSTRRAHRRNRRSRRAKEKRIARLRSWILRHKANGQKLPDPYKYKVSGQDIPFYRKGEKPSQIRGEMNWVNVVKSGKNISSEAFVKALITIFMKRGQSYDKYEIIGLNDKEFLKFIQERTTVSQEEHDELLDELNARYNNGSYSSLEYEHAKEHISKLMDNHDEKTNEKSRKAREKELEEVVKVFCSRNNIEKEANTWISELKHILNKRVRQARFKNRILIRCNICDKPTPSKRNLQVRELNYLDVVRNFLKAGRIDESSSLIEYYVDLYKSAKPIRDKILSNGELSEDEKLDKKKIIRKILPNAYCSENQFILSKQKNMKIQIVDLLFNKLYGRSRYCKDHLKARAEGKDIEEGRHGSIGKRHDRNVTLMNHDKRVINLIEKLLFKEDKELAEKLNKVGIKYISIEAPEPKTKRAKKGRTVERDPRKLKEKLFDAYNGICIYTGEILDKAKISEYQVDHIFPKSRDGPSIQDNCVITTSITNKSKGNMTPWEWFGTDNQKWNAFEARCNKFYREGNLSRRKLELLLNKGNEYPENNPTELARVGARIGNFQQELIELFKRYGLEEPQTLFSNGKPVIQVVRGNETQKLRRLWGTTNPDFVPPLKDRSATSNHAEDAAIAASIPPKIWREQIYRYEAKFHGGKERPDFAIPYIAPHWVEYARNRITALISVLGNTHYNWKTCIIDDTFYKRYNERAIYDKIYKQPSKKVTGSPESDTKHAESDTKPILLENEHYLKKGRKYYHKFIKEKRYFLESQPGGTLVDIKPKDGPRRRIQISPVFSEIILTDRVIWRRPIQPLLDLYVSGKLDPQSISNELLKKSLESYATHNQDLGPHVSIKLHDIIYLDKTGAHEKGYFIIKKLGKSIVMVSEERVKVYNDAYKNIPKEDTDSAKIQDKKREKDNSAITLSRKDITFLINSKSHSQT

SEQ ID NO: 8975 - protein, 1035 aa, synthetic construct
  REGION 1..1035: note = Synthetic
LNEFLDSLRLGIDFGEDYGGIALVQANRVLHAETFVDFHQATLKDRRRNRRGRRTRHARKMRLARLRSWILRQKLPGGQRLPDPYGVMHWPFKTKKGHTIKTGLASRQDGKRTIIQKCKIGTATPEEFVCSLTLLFQKRGFVWEGSDLCELSDQELAEELMTVRITEAVAAAIKEEIERRKKEPEDNKEGEIENLETVLCDAVKRARSPRTPEHRSIVESDLKDIVDGWTRKNCPQMTDMWKKELSCLLNKHVRPARFENRIVAGCSWCGKMVPRKSKVRELAYKVVVKNIRVEDFTSRQPLTAQEAEYFSQLWVDKEAKPPARTAIENKLKKLKASPKMANQLYELLAPSEPKGHTNLCQQHLEMAARGAFMCNRHHAICENNNGDHQTIDSVKEGRKRAGPRNPCREDRDRRMIRRLEQILFETPGKPGKPSHSIPRLITIEFPKPNTAQTAGCPHCKEKLSLDARVRWKMARPMKLEASNDSTPFFCPSCAAGIKITLYKKMRIKEKEIVQKYSPKDTDVLVRKTAAGGLKKLKYDMYLKETDGTCVYCGTSIGSGQIDHIFPQSRGGPNIDYNLISCCRTCNGNLKKNKSPWEWFGNIDQRWREFEDRVKKLPAPQRKKAILLSRESAYPENPTALARVGARTKEFIGRIKQMLLANGVKENEIADNYEKDKIVIQTIDGWMTSRLRGCWRTFPDGTANFPPKNDADKRNHAQDAVLIAACPPHTWRERIFTWKPENPYFSVLQKIAPRWKDHQATMKILGRYFPRWHNQNSDIQFVHQHKTQNGTSYTMRDTVESIDVGTDKKGGSIERIYSKSFRDFFSRTFKSLGIKMAMNEIPKLKSQWLNERRAAWMKKNPATPVPNQRERAWEASFPRRLQFDMGYGEDVAEVNPKNGPSRFVRAQPVNDRIEVWTNDVRQAQIRTVKNRILFRHIQDNSPQGRTLERIFRRNDMIQLDAVQKRGRKGITGKSYEAGEYMVVKIEKGGKFTAVPAHRGKGRENQRQVSQREIAKLCGVSLSPKRRKPSRSTSESG

SEQ ID NO: 8976 - protein, 523 aa, synthetic construct
  REGION 1..523: note = Synthetic
VIATMPLNLRLEQNLQHFIPSLRLGIDIGQWAGGIALVQDRRILHAETYVDYHATTLEDRRTLRRGRRTRHSKKMRVARLRSWVMRQPDPSKRQEIAAWRREHPKERLPHQLRLPDPYRLMSRHCFQCQPTEYRQTVATQKPSLGTWVEAAVKGALPDGTPLTSEGFVVALTQLFQKRGFVWGGSDLSEMSDKELSQELDHIRLTPEVALQIEREVQRRRENPQSEREGKIPDFEKRVADALCRQKQNRVAEHRSIVESDLREVVKKFTSAHSDGKNKLCDAWIRELLKLLNKPLRLARFENRVISGCSWCSKNTPRKYKVREDAYKAAVRNIRIRIPGAASGVPLNEQQRQEFLSRFYDPEFRNKTEKVRQATFERMLSRIRAQEALARQLAELTGNNKPTGRTNLCQQHLRLASEGSFQCYRHRAICKLSGGSEHETLERIERLGPAVRTTRNPCREAHDKRLIQRIEQIIFDGDKLRFGDVPSLVTIEFPKPNTAQTLTCPFCKEKLAADTQLRYRIRKL

SEQ ID NO: 8977 - protein, 1109 aa, synthetic construct
  REGION 1..1109: note = Synthetic
VIATMPLNLRLEQNLQHFIPSLRLGIDIGQWAGGIALVQDRRILHAETYVDYHATTLEDRRTLRRGRRTRHSKKMRVARLRSWVMRQPDPSKRQEIAAWRREHPKERLPHQLRLPDPYRLMSRHCFQCQPTEYRQTVATQKPSLGTWVEAAVKGALPDGTPLTSEGFVVALTQLFQKRGFVWGGSDLSEMSDKELSQELDHIRLTPEVALQIEREVQRRRENPQSEREGKIPDFEKRVADALCRQKQNRVAEHRSIVESDLREVVKKFTSAHSDGKNKLCDAWIRELLKLLNKPLRLARFENRVISGCSWCSKNTPRKYKVREDAYKAAVRNIRIRIPGAASGVPLNEQQRQEFLSRFYDPEFRNKTEKVRQATFERMLSRIRAQEALARQLAELTGNNKPTGRTNLCQQHLRLASEGSFQCYRHRAICKLSGGSEHETLERIERLGPAVRTTRNPCREAHDKRLIQRIEQIIFDGDKLRFGDVPSLVTIEFPKPNTAQTLTCPFCKEKLAADTQLRYRIRKLKLEPAHKADDAKNFSCPNESCSSSASGQQLRLVAERRIFNRGKVDWKLFSVPNNEAVLRKAAGGMKQKKKQQYLAEINAKCIYCGSSIGIENSQIEHIFPESRGGPFLDYNLTLACSRCNPAQDSKTNGWQGKDNRTPFEWIERDKGGPVTWQRFEERVQSLPMPQRKKEILLSKEESYPDNPTALARAGGRCRQFIEELKAMLQEHGISQDQIADNYATGKLVIQTIEGWTTSKLRASWQNHLDGRPNFPRKNDRDLHNHAQDAVVIAACPPHTWRETLFTETRIVDGKLVPGLAPFELAPDWSAFSAGLSAPLVRLLGRYRLNWKQPAVDTKFYEVSSRFNEPIRFVPLTELKANQVHRVIDQEISKELIRLCAAHAVTGKKVLSTAVIQDLRAVVKRSLNAPLRRVRVRFEGIGSPKKLVCISPKDGPVRRTRPTIPSEGALVWLREGVHLGSAKPRDVNISLLRPEPLQRLGLSAYEPPVPREARVLNENGWRRYDFIFLQDGWFRFKEFSDAKITVLPERSIPDSLAERMALDVVDGFPERYLGKSELLEYFRRLQSKIPEPNKRAQPDNAPASAQAAAGD

SEQ ID NO: 8978 - protein, 593 aa, synthetic construct
  REGION 1..593: note = Synthetic
VKEAQAIRAPWCTISAPLATGIRGVDLSIAREGDRTSLKQKADPHQDGSAEPGFRPVGAGRGQELGWVAEQTHPFFLPMQHLHPHLEKKFSRFLPQLRLGIDIGEWAGGIAVVRRGEILHAETYTDYHGTTLEKRRQLRRGRRTRHAKKMRLARLRSWVLRQELPDPYHLMRRKEFQCQPGEFNVGRKKLKSVTGKKKDDLGSWVEAVQDGHRTDPDAFVIALTQLFQKRGFKWEGSDLQEMTDKELAEELDETEGVRITPSLAEQIKAEIQRRQVNPQQEYEGRIKDLDGLLQKALGRKREPRTPEHRSIIEGDLRRLVEAYTSRHCPDNAGGWTKALLRLLNKRVRKLRFENRVLSGCSWCGKNTPKKSGSQIRELAYRAAVMNLRADAANSRRPLSDAERKYFLDIWERRKSDRPPSPETIKKKLLALRSQTEMAKQLWELLASPAPAGRTNLCLQHLKMQAEGAFLCSGHYAICKQSSDDPGKHILQERVRNVGPAIRGAPNPCREAHDERVIQRIERILFNSNGAPRFGAAPALITIEFPKPNTAQSYSCPSCNEKLAIDLRVRYRLRDVKAVKAEPCEEVLKFTCPA

SEQ ID NO: 8979 - protein, 1095 aa, synthetic construct
  REGION 1..1095: note = Synthetic
MQHLHPHLEKKFSRFLPQLRLGIDIGEWAGGIAVVRRGEILHAETYTDYHGTTLEKRRQLRRGRRTRHAKKMRLARLRSWVLRQELPDPYHLMRRKEFQCQPGEFNVGRKKLKSVTGKKKDDLGSWVEAVQDGHRTDPDAFVIALTQLFQKRGFKWEGSDLQEMTDKELAEELDETEGVRITPSLAEQIKAEIQRRQVNPQQEYEGRIKDLDGLLQKALGRKREPRTPEHRSIIEGDLRRLVEAYTSRHCPDNAGGWTKALLRLLNKRVRKLRFENRVLSGCSWCGKNTPKKSGSQIRELAYRAAVMNLRADAANSRRPLSDAERKYFLDIWERRKSDRPPSPETIKKKLLALRSQTEMAKQLWELLASPAPAGRTNLCLQHLKMQAEGAFLCSGHYAICKQSSDDPGKHILQERVRNVGPAIRGAPNPCREAHDERVIQRIERILFNSNGAPRFGAAPALITIEFPKPNTAQSYSCPSCNEKLAIDLRVRYRLRDVKAVKAEPCEEVLKFTCPACDVVVQVKAARQLTIRGVRRRIPVTLKNTDAFLRKAKGGMKDKKIQTYLRETRNSCVYCGLTIDRSTIEIDHIFPKSKSNPGIDSNLVACCQNCNNSRTGKGDRTPWRWKGEADRQWWQEFERRVRKLPLPMRKQRILLSADEFYPENPTALARAGARPRAFIEELKKMLGRHSVERDQIADNYEEGKLVIQTIDGWMTSQLRRSWVVDRDGTPNFPEKNVWDLHNHAQDAALIAACPPHTWRERIFAFGEHGDQAPKELAPNWGAFLAGQHVKKPIVTVLGNYDVNWRKQFANTEFWRDPLGEHTKPIKGELLKNLKAYQAENIKWPTLQEEFKAVCEKYAIKGRSNLPAEALAELQERIKNRKFESAKVGRARRSWNKHHSEKQSRMSETPAELQERLKTENDVRRVQYKTHGSGKPFVIRPSDGPPRMTEAQPAAEGVIIWLKKGKTLEEAKDRDLVISVVRPSPLQQFDVPKEDPPLEEGVQRWGPWRRNDFVRLPANGRHREGWYRLTKFEDDGISALPERAIPNELVKRMRLKDDDKARELPSQERKLVKRELLPYLKRGLLSEVSHATRPDSA

SEQ ID NO: 8980 - protein, 987 aa, synthetic construct
  REGION 1..987: note = Synthetic
MERDYYFRNYYLPAQTTSDFIDSVRIGLDLGEWTGGIAVVRGNEILHAESYVDFHGMTIEGRRNIRRGRRTRHAKKKRLARLRSWVLRQKLPDGTRLPDPYVVMHDKKFMVKPEIFGKKGIDPVAAPDWIQKAKNGNIDPSGFVRALALIFRKRGYMWDGAEMEKKSDAELKDFLENSRIPPDAASEIEAIISFRKENPDTPERGKKKVTPDNLLLLLKEATEREKQPRKAEHRDIRKADLDGVIDGAARSFRIPGETTDKWKKELKQILDKPVRKTRFNNRIKTTCAWCDNPTPRKKKVKELSYLAAVGNVRVQEASGQKRPLSDEEKKIFFQWWKEKDDTDKRRIGETGIKNTLKKLNADEEMARQLYDLLRGHNMDGRARLCRKHLEMAAEGKNMYDAGVDWQTMKTRTMHNPCREQHDERIIRRLENILFISGEKGEEAWRYGPVRFISVEAPLPGQDKKKKKGRGKKKEKGEVPERKTDTLKERLIKEIGGKCLYTGKELSVETVEIEHIHPRSMGGPDLQENFTVTSVQANKEKANRTPFMWFGKDQKKWSNFVERVNNAQISDRKKQILLNEEDDYPDNPTPLARTSSRYRQFVRDIQLLFDKYGVEPPVPNYQLGKPHIQRVEGWDTQRLRRSWSNHKDGTENFPEKDRLDLFNHAQDAALAAALPPHTWRARIWRSRREIINEETGEFIRIHEVPRVLAPDWNVFMDNRTGPILQVLGNYGGSWKRGFSDLNFVQLDGPEPMEYKNLKQRIPIGRYVVGKNSLADKSMETRINKTAHLEGIKDGGSIPEDKLDILGPEGRRPRHVTTFKPKGGPVLSFVKPSDGPNRIVQFKGVSEGCILWKKKDGRKGAIEMSRIYSSPLKSLGINAIDPPLEPGSEILGSLHKYQIIHLDEKGDARAGWYIVKEFGKSGVVTFPEHYYPIDVLSEKDKEYLKEINQDKKGKKEKPLKQAAERSIGKTELAEYFEKRRAEKRKRKKG

SEQ ID NO: 8981 - protein, 964 aa, synthetic construct
  REGION 1..964: note = Synthetic
MQTLLQVFMMLVRPKLRQRIAEFLETYRLGIDFGEAAGGIALVHRNDILDAETFIDFHETTLEQRRTLRRGRRTRSSKKMRLARLRSWVLRQKVDGKQLPDPYRIMREHVYKPGNKDYSLKFQTKPGMYRQKGKDPVSSPTWIAAAKAGAVDAEGFVCALTHLFQKRGYKWDDRGLHEMSDAEIKEFLMSSRIPNDELQSQVSAEIESRAEHPDDPSRGRTKVSPEELRSLLAEARKREPQPRKAEHRSIKEQDLREVVAGFGNAAKLPRETIKRWQKELAQIFNKRLRQARFENRLKTGCAWCGKATPRKVKVRDIAYRAAVHNLRAREGFRLRPLSPDELNDFWTWWDDREKSPGVDKIKRHLKKLGAQDKMARQLHNLLKGKAEGRASLCRQCLGMAQLGKTMKDAGVDWQTISTRKAPNPCREQHDGRVLQRVEQMLFVKGKRGEKAWRHGPVAFITLEVPRIVTTDLKKGQMAERATMGLRERLCKETGEKCIYCEAAITPQGMQIDHIFPESRGGPDLRDVNLVAACSACNDSKTGKRNQTPHEWFGADAVQWAGFCKRVESLPLPLRKKELLLSESDEFPDNPTPLAHVGSRPRQFVVGLRTLFARYGIGEPTIFLKIGHPHVQRVEGDRTARLRRSWLFKADEKSPNFPPKNRTNLANHAQDAALLAACPPHTWRDHIFCYGAHRPSNHPGKKGQMVWMSGLALQELAPDWAAFEQNRQKPLLRVLGRERLSWKRSFSKETFWQEPEDLDAGKLKKHKQLTALTPDAAKAVISEQYRDRFLKLAGELGLKNKQVATEDKLKSAFGSTRRITVTSQPGGPVVQIKPKDGPLRKVWVQPGSEAVLIWQSPKGKVGLSVVPNPTITEFAKRKFSPPVPSGARTLGRWSRNQLVKLPASAKHPAGFYRVTKIQENQVTLLHETSLPTEIAERIKLPKDERQSLEPRTLGKTELAKLFAQP

SEQ ID NO: 8982 - protein, 945 aa, synthetic construct
  REGION 1..945: note = Synthetic
MMFVPPKLRDRIAEFLETYRLGIDFGEAAGGIALVHRNDILDAETFIDFHETTLEQKRTLRRGRRSRHSKKMRLARLRSWVLRQKVEGKQLPDLYRIMREHRYQTKPGMYQQKGKDPVSSPTWIDAAKAGAVDAEGFVCALTHLFQKRGYKWDDRGLKEMSDAEIKEFLLSSRIPSDDLQSQVSAEIERRAEYPDDPARGRTKVSPEELRSLSAEARKRERQPRKAEHRSIKEQDLRAVVVGFGKSAGLAPEVIARWQKELVQILNKTLRQARFENRLKTGCAWCGKATPRKTKVRDIAYRAAVHNLRAREGFRHRPLSVGELKVFWDWWENREGAPGVEKIKRHLKKLGAQDKMARQLYDLLKGKAEGRASLCRQCLGMAQLGRTMKDAGVDWQTISVRKAPNPCREQHDVRVLRRVERILFVDGKRGNDAWRRGPISYITLEVPRVVTTDLKKGEMAERVTMTLRERLHQEVGGRCVYCEAEITPEGMQIDHIFPESRGGPDLRDVNLVAACSACNDSKTGKRNQTPHEWFGADTARWAKFDKRVESLPFPIRKRELPLSESAEFPDNPTPLAHAGARPRQFIVELRKLFARYGVGEPTIFLKTGHPHVQRVEGDRTTRLRRSWMLKADEKTPNFPPKNRTDLANHAQDAALLAACPPHTWRDHIFCYGARRPSNHPDKKGQMVWMGGLALPELAPDWAAFERNRQNPLLRVLGRERLSWKRSFADQTFWQEPDDVEASKLKKHKPIVELTPESVKAVVQIEARERFEKLAAETNLKSKHSVPEDKIKSAFGQMRRVTVTSQKGGAIIQVKPHDGPLRKEQVKPGSRAVLIWQNRKGKIDLTIEAHPSIAHFVTRAEESRPPEGALLLARWERHKLVWLPAQGGHPAGFYRVKEFSDGGIILLHERALPVEIARRAGIGADEGGKPRERKLGKTELARMFAQP

SEQ ID NO: 8983 - protein, 724 aa, synthetic construct
  REGION 1..724: note = Synthetic
LQSAYEAACRRQPEPRKAVPRQVKEGELKKIVDAFGKSIGLGAGEIARWQKESIGLLNKVLRESRFDNRLKSTCSWCEKKTPKTSKPNVRRMQFEAAVKNIRLHGPGGEIVGLHPDQEKIFLNWWEKRQLQKSGNYKFSNSRSAPLSDRAPTEDNLEKYLAQMEVISSAVKKKGSWVRGFPMLRQLNDLLNHEPRNGRSGLCLEHLEMARQGKTMKDAGVDWQTMKIRRAPNPRREQHDARVLRRIESILFQKGKRGAEAWRHGPVSCITLEIPEPQTKRLAKGEMSERQALTQKQRLYMETGGKVDTGKMTGGICIYTGKPTAVEEMESDHIYPRSRGGPDVFANLVCASKRANKDKDNRLPSEWLKGSQWEEFKSRVEALPALSEAKKKRLLLDPGSEYPEDGTALAHSGARPMQFIQGLIRIFKSYGAEPPVINYETQKPLVQRVSGRWTSELRKSWMFKDNEGKRLNFPEKNRADLYNHAQDAALLAATPPHTWREQILTEEAVRLCVKRDATGQIILKNGVVEKEMRIRPGVAALALAPDWDLFFKNRKVSLVRVLGRTGLRWRTKLLDQSLYQNPGILVESKLKIHKLLDSGAVGLPGQRRFTAKTQKGGLMVRVPCHGSNAAPYRKMQVKPVKSEAVIFWQDAKGKFQISLKKPAAIGNFVKNLIEPIIPMDAKRLGSWKKNQIVLLSASGEHRAGYYRVKELSEVLPILRTAFGLI

SEQ ID NO: 8984 - protein, 953 aa, synthetic construct
  REGION 1..953: note = Synthetic
LGVDFGQTTGGCALVRGREILHAETFVDFHNTTLETRRTLRRGRRTRRSKKMRLARLRSWVLRHRLPDGSRLPDPYQIMWNVEGGFQTKPGLYKRKGRSPAEYETWISAAKRGEVDSAGFVCALTHLFQKRGYKYDQKELDDFTSERLIDFLNSCCLLAQAPELEKEMRAEVERRNKPKLHEAFEAALIRLPEPRKAVPRQIKEQDLRTIIEKFGRKYNMSSQTIARWQKELCGLLNRILREPRFDNRLKSGCAWCGKKTPRLKKPEVREKAYLAAVANLRVHRAANPRLTRQLNKTERELLVHWWKRRQLARVGQYEFPKGRKVDVFERAPTGENIEKAFEKLGIVKTWLRDKRGKPYLGYAMLSQIDNLLNHVPRSGRASLCMEHLEFAANGKHMKDAGVEWQRLKVRRAPNPCLEQHDARVMKRIERFLFVIGKRGDGAWRHGRISLITLEVPEPQTERVGKRQQTERQPLGLRGILHQETGGVCIYQNTSACRARDGKIESLDAVEKDHIFPRHRGGPDLRLNLVCACRECNHPDSGKGHRLPSEWIGFGSEPWKQFEARVNALRSLPERKKQLLLARDLDEAEQVLADPTSLAHVGARPRAFIAELIAIFKKHGVEPPRVDYQLGAMDEGAPHVQRVEGRWTTDLRLAWMWKDREATQINFGAKDRSDLYNHAQDAVLLAATPPHTWRKQILVETARRPCARRDQSGRIIVDEHGYVQTELRDRPGLALLDLAPDWADFMTHRRKPLVTVLGKMKANWRRQIMDQSFYQHPNSTDDAFLQIHKPVEDAGAEGKMRHKTATVPKGGLVIRVPYTDPATRTRRMRKVQVKPIASVAAIFWQDQKGRLKISLERPTAIHQFIEHPIDPPLADGVRPIARWERGDTIRLDAANGFEAGFYRVKELAEGEIIVIPENNVTAAIAQRLQLPKDEIRTRERKLGKAELSKLFAGS

SEQ ID NO: 8985 - protein, 968 aa, synthetic construct
  REGION 1..968: note = Synthetic
MVPIHLRQRVEDFLCGLRLGVDFGETTGGLGLVHGRTVLHAESFVDFHDTTLETRRTLRRGRRTRRSKKMRLARLRSWVLRQKLPDGTRLPDPYPIMRDLRFQTKPGLFQQKGKPPTDCPTWIDAAKGGAVDASGFVCALTHLFQKRGYKYDDKELAEFSEARLLDFLDSCCLLGQAPELAATMDAEVRRRGRPKMIEAYRAAFTRPREPRKAVPRQIKEGDLRAMVAAFGKRVGLPLQTTQRWQKELCGLLNRVLREARFENRLKSTCAWCEKKTPRLKKPGVREKAYLAAVGNVRVCTEVRGKTRPLNDQEKAGFIEWWKRRQMPRDEQQKIFIPRAPNIFDRAPTEANIEKAFAQLGVVKSWLRDAKGKPYLGYGMLSQVNNLLNHEPRGGRASLCMEHLGMAAAGKHMKDAGVEWQTMKIRRAPNPCLEQHDARVMQRIERLLFLKNRHGEAAWRWRDEAGKPLRLSFITLEVPRPETLQVGKGQQTQRQGKGLREQLFDETDGACIYQHTAACLARHGALTLETMEKEHIVPRERGGPDVRVNLVACCHDCNHPDSGKGGRLPSEWIGYGSTEWQEFEARVNRMNRLLDAKKNLLLLPPGQSFPEDPTPLAHVGARPRAFVAELIRMFERYQVPPPTVEYRLDAPHVQRVDGKWTTDLRQAWLWKDEQAREPNFPVKDRADLFNHAQDAVLLAATPPHTWRNQVLVDSAIRLCVKRDDQGQLVFENGRPVKELRRRPGLPLLDIAPDWVGFMQGRRKPIVTVLGRMKASWKRQMMDQSFYREPDRMDDKFLTIHKPLEGATSSGGRPGQRRHMAEVPKGGLLIQVPYFDPASAQKRNRKVQVKPVGSTAAIFWRDAKGRFQISLERPASIRRFVPQPVEPPLPVATKPVGRWERGQMIRLEARGDFPAGFYRVKELAEGGIIVIAENNLTAAIAERLRLPKEAVMTTERKVGKTELCKLFPPH

SEQ ID NO: 8986 - protein, 946 aa, synthetic construct
  REGION 1..946: note = Synthetic
MNGVPPDLASRVDSFLNSVRVGVDLGEAAGGIAVVRNREILHAETYVDFHDATLEQRRILRRGRRTRHAKKMRLARLRSWVLRQKLPNGERLPDPYDVLADKRFWPKPGTYETKGADPCGGPGWIEVAQKDGLDARGFVRAITLIFKKRGYRYDDKDFEDLPDARLHDFLESCCILREAGTMAEQLRAEVERRARPKLTAAYENSLNRPPEPRKAVPRQIKENAVRVIVQRFGEKHRMEPMVIERWCKELVGLLNRVLRPARFDNRLRSGCSWCGKKTPRLKKPEVRFKAFRAAVGNLRVPKWTGAREFRSLSNEERKPLLDWWEKRASGSDFPKGPKVPVTERAPSEDNISKYLDSIESPRRWMKNSKGQWNLDHPMLPQLNDLLNRTPRRGRAKLCMQHLDLAAGGGSMMDAGLAWQQMRGRHAPNPRREQHDQRVLRRLEEILFIRGKKGQVAWRHGPVALLTLEIPDPQTERVGKGKQTERKTLSIRERLHGESGGTCMYCGKEIPVEATEMDHIVPRARGGPDLQLNRVAACHTCNHPDTGKGNRLPSEWKKEEEWLRFEERVRRINMPDFKRMLLLLPAGANYPDDPTPLARVAARSGAFAAEIAELFKTYGVEPPSPAYILGKPHLQVVSGRWTRDLRMSWLFHDREARQENFPRKDRTDLFNHAQDAALLAATPPHTWRPRILCETAVRPCVKKDEKGALVVLENGSFEHELRPRPGVALLALAPDWAGFLRRRAVPIVRELGKLKATWRRQLMDLSLFQQPANVDTPKLWVHKPLPQPTTTGQRRYTAKSQKGGLVVRVPHHDGTSGVRKVQVKPIQSEAAILWSVVRGSRESLCLSRVRPRAIRELVQDMIDPPLPKRAKKIGRIERGEVIRLDGVFYRVKELSRDNVIVIPENALPDALADRQGIPREQRAASPERTLGKRELLAYFRSRPDPAT

SEQ ID NO: 8987 - protein, 957 aa, synthetic construct
  REGION 1..957: note = Synthetic
MALNSALNKRVKEFLSIARLGIDLGEAAGGIALVRGNEILHDETYLEFREATLETRRTLRRARRTRNAKKMRLARLRSWVLRQFIPSTIPGAGLKDGKSRLPDPYHLMQDKKYQTLPGFYRVEGKDPSNASGWVDAAKNGEVDAEGFVIALTHIFKRRGYKYDDRDLEELSDARLAEFMDSCCVLKDACSLADDLRVEIERREKPKLMDAYEQALVRKPQLRKALPRQIKENDLRTIVERFGTHYGLDAAVVKRWRQELVGLINKVVRPARYDNRLRSGCSWCGKKTPRLKKAKIRELNLHAAVENIRARPDERLRRLERLEERQKEPFWNWYQRRIEEKEGKYSFPKGPKAPLTERAPTKDNIEKYLESVKVPKQWMKDARGKTKFGFPMLAQLDNLLNRTLRRGRAKLCVEHLNMGAEGKTKKDAGIEWQTMRIRRAPNPKREQHDARVLRRVEDILFIKGKRGVAAWRHGPVSFITLEVPKPQTEKAGKGQQTERKDTNMRERLLAETDGRCIYCWKEISVEGTEMDHIVPKKGKGGPDLQLNRIASCHDCNHPDTGKGNRLPREWLNGEQWAEFEKRVRALRLPESKESLLLLKAGESFPDDPTSFARVGGRVGAFVAEIIRLFEKYGVEPPTANYTGGKPHIQCVEGRWTRELRRSWLYKDREAKEDNFPKKDRTDLFNHAEDAAILAATPPHTWRLQILAETALRPCARRGADGKPLFGGNGKVITELRRRPGVALLDLAPDWAGFMKQRTSPIVRVLGKLKADWKSQLTDLTFYQKPRNLDGPLYVRKPDPGSNRRVTTSAQKGGLVIQMPNADRTTGVRKVQVKPYASVAAVVWRYPGGRKGNIQISLERPKAIRKFVGSLIDPPIPKGAVRLGRLERMQTIRLEDGFYRVKELSDKHVIVIPENAVPDAVAKRMGIPKDERRTLSERTLGKRELQALFADKLAPPVKE

SEQ ID NO: 8988 - protein, 977 aa, synthetic construct
  REGION 1..977: note = Synthetic
VALHPRLERKIKEFLPTYRLGVDLGEAAGGLALIHNNNILHAETFTDFHEATLETKRALRRGRRTRHAKKMRLARLRSWILRQCIPAHVTGAEIKDSYSRLPDPYRLMKDKKYQTLPGFYEVKGQNPEKSPTWIDKAKAGEVDAEGFVIALTHILQKRGYKYDGKEFSDYDDSRLIDFIDSCAMLAEAPEMRKALEDEIMRREVGEKEKPKLHEAFDNALNRQRERKKALPRQVREKDMEDMVDVFGRRWQLSQEIIANWKSQLTGLLNKVVREARYDNRLKSGCSWCGKKTPRLAKPEIRELAFEAAVGNLRIRERDGRDRPISDEERNPLRGWFQRRRENHDYSRATKNTPIEERAPSEDNIRTYLEQIGVKKAWIRKKKGKEKWKFDFAMLPQLDNLINKEARKGRARLCVEHMRMQAEGKTMKDADVDWQSMRKRNAPNPRREQHDARVLKRIERLIFNRGKKGTDAWRHGPIAVITLEVPMPVDLERAREKEQVERKPLNLRQRLHAETEGVCIYCGENVHDRTMHLEHIVPQAKGGPDVQMNRIASCPKCNADRDTGKKDMLPSEWLTGDKWNVFKSRVMSLNLPPLKKQLLLLEPGSKYPNDPTPLARVSARWRAFAADIMWLFDEYSVPVPTLNYEKDKPHIQVVRGNLTSRLRRDWRWKDHEATVENFPDKRRTDLYNHAQDAAILAAIPPHTWQEQIFSDMAVRPCAKKDEQGNILKNEKEMRPRPGIAALALAPEWADYERTQKELKRPMVHTLGKLKATWRRQIMDLSFYQNPTDNDGPLFIRKVDAKTGKRETKEVQKGGLVVQVPHYDGTSGKRKVQIKPIQSNAIILWHDPSGRKDNLNISIERPAAIKKFVKHPVDPPIASDAIILGRIERASTLWLREGKGTVELKADKKSVRSSVVMPEGIYRVKELGSNGVIVVQENAVSKELANKLGISDDQFSKVPERALGKKELAEYFKGNQRSG

SEQ ID NO: 8989 - protein, 830 aa, synthetic construct
  REGION 1..830: note = Synthetic
TLEKRRQLRRNRRKRNARKRRIALLRSWLLRQEIPAAIPEGRVTAKGRRTLPDPYVLMGQKKYQTLPGLFGIGKKRGYNPNVWKNGRDARARTWEQAARAGEVDAGGFVIALTHIFSKRGFDFHRKRGFDDYSDKEFIAFLEGCALMEAPDLRSVFDEEVRRREDEGDGDGEIKKNVALRTAVEEAFQRGREPRRAMPREVREKDLQAAVEGFGKRWGMSEETMERWKRELTGLLNRVIRPARFDNRLRSGCSWCGARTARLKKPEIREMALKAAVGNIRVAGERGKERPLTDAEKAPFLEWFRKRQAKEKFTGRSESAPWADRPPSEATLKAYFTHVGVAEKWFRKKNGKWERGFGMLPQLDDLINHQAKTGRARLCQRHMGMQAEGKTMNDAGLDWQTLRRRNAPNPKRLQRDTRILKRIERLLFLPDKTGAEAWRHGPVSFINLEVPVPEDLERAQKKQLTERKPQTLRQRLHAETGGICVYCGIDVEIRSMEMEHIVPRARGGPEGQMNRVSSCRKCNHPSTGKGENLPSEWLKGADWKAFRKRVEKSSLPDFKKMILLLDPGSSFPDDPTPLARVAARWRAFAADIAGLFEKHGLEPPVLNYEKGKPHIQVIRGNLTAKLRRSWRWKDGLCQDGQPDNPPSTDNFPEKDRSDLYNHAQDAALAAAVPPHTWRDSAMSETLMRPALKKDEEGNALMDEKGAFLTEFKPVPGHAKLELAPDWADFEARRKEKLFPMVHVLGRNRASWKMRVFKESLYKEPLDLADKKLRRNKPLKETNSSGQRRKIERVQKSGGMVIKVPHKDRTTGWRKIEVESGIASTESVVIWK

SEQ ID NO: 8990 - protein, 965 aa, synthetic construct
  REGION 1..965: note = Synthetic
MSIIPTSLQSKINEFLPTIRIGVDFGEHAGGIAVVRENEILHGETFIDFHKADLEERRGARRGRRTRQAKRMRLARLRSWVLRQEIPRVIPGGVERGGKYLLPDPYIILNNKKFWVRPDTFQQEKKDPKQTVSWLDLAKNGDVDACGFVRALTLLFKKRGYKWDDRAVSEMNDMQLKGFLDHARIPSEATALRDEIMREIQRRTENPGDPVRGRKKVGPLELTALLEQACSRLSQPRVAEHRSVKEAELKAVVDGFGCSKLPPETLGRWKKELAALLNKVIRPARFDNRVRSGCAWCGKKTPRKAKVREIAYRAAIHNLRALTGGREGALPDEESRQFLDWYLDRKGAPGLATIKKRLLKLNYRQAGMANQIYDLLKNEHPKGRVSLCVPHLEMAAQGKTMKDAGVDWQTISTRNAPNPSREQHDARVLHRLEQIVFVKGKRGDEAWRHGPVTLISLEVPEPQTERAKKGQVPERKSQTFKERLLNEIAGRCIYCDQSATDRDHIFPRSYGGPDIWDNQIATCVNCNQTKGNRTPFEYLRGEPARWQEFKRRVNGLSLAPRKKQILLNESEEFPGGDPTPFARVGARPRQFVVALQKLFTNYGVEPPTLNYVTGRPHIQLVKGGLTNKLRESWQLNSQGEINFGEKERWDLYNHVQDAAIIAACPPHTWRDRIFIHHAIKPGMAVPEIAPDWIGFLQSRQHPTVRILGRYPISWKRSLFKETLWQEPANIQAKKGVVYMPVTRIAASVILKEGENEGIVSPFYREKLKQLVKKLRLEKLDTIPADELSRELPGVRRVKVFRQKVSGVWVSITPKDGPMRKMIVAPESASEGAVYWLNKDTDDELGISIIRPRTLGLFGVSRLDPPIPKGAKRLGAWRRHQMLWLGADSKNGCGEGWYRLKEFSAQDVKLLPENAMPTEIALRLHLKRNGSTEKGMFLKERKLGRREILKFWLERPRRNFRKPPPV

SEQ ID NO: 8991 - protein, 956 aa, synthetic construct
  REGION 1..956: note = Synthetic
MEARPPSLQKFLDSYLPTVRVGIDFGEHAGGVAVVKNNEILHAETFIDFHKATLEERRTLRRSRRTRHAKKMRLARLRSWVLRQKLPNGDRLPDPYLILRDPRFHVQPGLFKTQGRNPLNSSSWVERAKQGKADPAEFVRAVTLIFQKRGYKYDDRGLSELKDIELKDFLESARIPPQASDFRQDVERELKRREENSDDPSRGRKKIPLAELTALYDQACNRQHQPRIAEPRSVKEADLRAVIEGFGKNAGLSEETIQTWKRDLVGTRDSADKHRHYGLLNTVLRPARFDNRIRSGCSWCGKKTPRKARVRELAYRAAVHNLRGRDGWRDRPLTNEETQVFLEWWHDREKAPGLATLKRRLNTLNPRQARMANQLYDLLKNTDPKGRTNLCEQHLEMAAQGKTMKDAGVDWQTISERNAPNPQREHHDQRVLHRLEQILFVKGKHGPEAWRHGPVSILSLEVPEPQTERARPGQMTQRKEVSFKDRLLNELDGHCVYCGGTASDKDHIFPRANGGPDIWDNLIAACESCNKAKDNRTPFQWMGSDSLKWRSFSTRVSGVPLAPRKKQILLNETDDFPGGDPTPFARVGARPKQFVIEMGNLFTRYGVPPPELHYRIDGCHVQLIRGRQTARLRDSWLVARGGEQNFPAKDRRNLYSHAQDAALVACIPPHTWRDRIFITEGERPGRDGLVVKKTGLAIPELAPNWSAYMAQRRHPIVRVIGNYPVSWKTSFADQSFARNRRDGETGKLRISIPVQQLKAKNLKSLVSKPWRPQFTAFAQEIGLKDNQVFPADKLSERFPHLRSLQLYRQPGGTPVTMHPADGPARQVQIKPASEGVVIWRAEKKIGLSIIRPRPLLRFGESRIDPEIPAGAVLLATLRRHQTIHLPKTKNNPDGFYRVTKFQEGGITFMAESAMPQDIASKLELGRATDDTSEQPASREVVLGKSELAACFAKKTS

SEQ ID NO: 8992 - protein, 662 aa, synthetic construct
  REGION 1..662: note = Synthetic
MEARPPSLQKFLDSYLPTVRVGIDFGEHAGGVAVVKNNEILHAETFIDFHKATLEERRTLRRSRRTRHAKKMRLARLRSWVLRQKLPNGDRLPDPYLILRDPRFHVQPGLFKTQGRNPLNSSSWVERAKQGKADPAEFVRAVTLIFQKRGYKYDDRGLSELKDIELKDFLESARIPPQASDFRQDVERELKRREENSDDPSRGRKKIPLAELTALYDQACNRQHQPRIAEPRSVKEADLRAVIEGFGKNAGLSEETIQTWKRDLVGTRDSADKHRHYGLLNTVLRPARFDNRIRSGCSWCGKKTPRKARVRELAYRAAVHNLRGRDGWRDRPLTNEETQVFLEWWHDREKAPGLATLKRRLNTLNPRQARMANQLYDLLKNTDPKGRTNLCEQHLEMAAQGKTMKDAGVDWQTISERNAPNPQREHHDQRVLHRLEQILFVKGKHGPEAWRHGPVSILSLEVPEPQTERARPGQMTQRKEVSFKDRLLNELDGHCVYCGGTASDKDHIFPRANGGPDIWDNLIAACESCNKAKDNRTPFQWMGSDSLKWRSFSTRVSGVPLAPRKKQILLNETDDFPGGDPTPFARVGARPKQFVIEMGNLFTRYGVPPPELHYRIDGCHVQLIRGRQTARLRDSWLVGPAQPLQPRAGRGARRLYSTAHLA

SEQ ID NO: 8993 - protein, 836 aa, synthetic construct
  REGION 1..836: note = Synthetic
SSSWVERAKQGKADPAEFVRAVTLIFQKRGYKYDDRGLSELKDIELKDFLESARIPPQASDFRQDVERELKRREENSDDPSRGRKKIPLAELTALYDQACNRQHQPRIAEPRSVKEADLRAVIEGFGKNAGLSEETIQTWKRDLVGTRDSADKHRHYGLLNTVLRPARFDNRIRSGCSWCGKKTPRKARVRELAYRAAVHNLRGRDGWRDRPLTNEETQVFLEWWHDREKAPGLATLKRRLNTLNPRQARMANQLYDLLKNTDPKGRTNLCEQHLEMAAQGKTMKDAGVDWQTISERNAPNPQREHHDQRVLHRLEQILFVKGKHGPEAWRHGPVSILSLEVPEPQTERARPGQMTQRKEVSFKDRLLNELDGHCVYCGGTASDKDHIFPRANGGPDIWDNLIAACESCNKAKDNRTPFQWMGSDSLKWRSFSTRVSGVPLAPRKKQILLNETDDFPGGDPTPFARVGARPKQFVIEMGDLFTRYGVPPPELHYRIDGCHVQLIRGRQTARLRDSWLVARGGEQNFPAKDRRNLYSHAQDAALVACIPPHTWRDRIFITEGERPGRDGLVVKKTGLAIPELAPNWSAYMAQRRHPIVRVIGNYPVSWKTSFADQSFARNRRDGETGKLRISIPVQQLKAKNLKSLVSKPWRPQFTAFAQEIGLKDNQVFPADKLSERFPHLRSLQLYRQPGGTPVTMHPADGPARQVQIKPASEGVVIWRAEKKIGLSIIRPRPLLRFGESRIDPEIPAGAVLLATLRRHQTIHLPKTKNNPDSFYRVTKFQEGGITFMAESAMPQDIASKLELGRATDDTSEQPASREVVLGKSELAACFAKKTS

SEQ ID NO: 8994 - protein, 956 aa, synthetic construct
  REGION 1..956: note = Synthetic
MEARPPSLQKFLDSYLPTVRVGIDFGEHAGGVAVVKNNEILHAETFIDFHKATLEERRTLRRSRRTRHAKKMRLARLRSWVLRQKLPNGDRLPDPYLILRDPRFHVQPGLFKTQGRNPLNSSSWVERAKQGKADPAEFVRAVTLIFQKRGYKYDDRGLSELKDIELKDFLESARIPPQASDFRQDVERELKRREENSDDPSRGRKKIPLAELTALYDQACNRQHQPRIAEPRSVKEADLRAVIEGFGKNAGLSEETIQTWKRDLVGTRDSADKHRHYGLLNTVLRPARFDNRIRSGCSWCGKKTPRKARVRELAYRAAVHNLRGRDGWRDRPLTNEETQVFLEWWHDREKAPGLATLKRRLNTLNPRQARMANQLYDLLKNTDPKGRTNLCEQHLEMAAQGKTMKDAGVDWQTISERNAPNPQREHHDQRVLHRLEQILFVKGKHGPEAWRHGPVSILSLEVPEPQTERARPGQMTQRKEVSFKDRLLNELDGHCVYCGGTASDKDHIFPRANGGPDIWDNLIAACESCNKAKDNRTPFQWMGSDSLKWRSFSTRVSGVPLAPRKKQILLNETDDFPGGDPTPFARVGARPKQFVIEMGNLFTRYGVPPPELHYRIDGCHVQLIRGRQTARLRDSWLVARGGEQNFPAKDRRNLYSHAQDAALVACIPPHTWRDRIFITEGERPGRDGLVVKKTGLAIPELAPNWSAYMAQRRHPIVRVIGNYPVSWKTSFADQSFARNRRDGETGKLRISIPVQQLKAKNLKSLVSKPWRPQFTAFAQEIGLKDNQVFPADKLSERFPHLRSLQLYRQPGGTPVTMHPADGPARQVQIKPASEGVVIWRAEKKIGLSIIRPRPLLRFGESRIDPEIPAGAVLLATLRRHQTIHLPKTKNNPDSFYRVTKFQEGGITFMAESAMPQDIASKLELGRATDDTSEQPASREVVLGKSELAACFAKKTS

SEQ ID NO: 8995 - protein, 886 aa, synthetic construct
  REGION 1..886: note = Synthetic
LLVADLPATLRRRIADFLPTIRLGVDFGEHAGGIAVVRGTDILHAETFLDFHKATLEERRILRRGRRSRNAKKMRLARLRSWVLRQKLAEGTRLPDPYKIMRDPRYMVQPGVYGEPGSDPRSAPSWIELCKTGKADAAGLVRALTLIFQKRGYKWDAIALQEMSAAKLKDFLMTARIPTDDPSLAAEVQGLIERIRDSPEQAARGKSKITPEELEALLQLACQRGQQPPRPRLAEHRSVKEAELRAVVEGFEKFADLPNELTDRWKRELCKLLNKVLRPARFANRLKTGCAWCGKATPRKARVRELAYLAAVQNLRVRENFRNRPLHAPERKVFLDWWADPNSAPGEKKIAATLAKMNPQQKGMARQFHDLLKNPSPSGRASLCVEHLRMAADGKTMKDAGVEWQAVAVRKAPNPCGERRDQRILHRVEEILFRRGERGDSAWRWGPVQYVSLEIPEPETERPAKGTRTERQELTLADRLAEETDGCIYKALGDCAGPLTKDHIFPRAAGGPDVRGNLVAACTAHQNEKGSRTPFRWLEGNATKWAAFRDHVNKLNLPERKRRILLNETEEYPEGDPTPLARVGARPRQFVVGLRALFAKYGVPAPRADYQLGQPLVQRVGGRETNHLRFSWWKKPDDSENFPFPKDRSKLYNHAEDAAILAAVPPHTWRETVFCHTAPRPSRDGKLKPRPGLAIPDLAPDWAGFLVRRRQPLVRLLGRYPVTWKNQFADLTFWREPQKESTRLKRFKLLRDLQRKDIERIVSPKVRSLVEEIAVCVGLAEKGTIAQALARQLAGEGAKGSAVEKQLPRAVEELERRWPGIRRVQVSSQKGGTLAVVNPADGPARKVQIKPASEGVIVWQRLEGEKRKQPKIHISILRPKPLQQFG

SEQ ID NO: 8996 - protein, 757 aa, synthetic construct
  REGION 1..757: note = Synthetic
VKEADLRAAVEGFEKSAGLPNELSDRWKKELCRLLNKVLRPARFANRLKTGCAWCGRATPRKSKVRELAYLAAVNNLRVRETFRLRPLNDNENERGVFLKWWSDPKTAPGVDSIKNCIVKMNPDQKGMARQFYDLLKNPEPKGRASLCVQHLAMAAEGKTMKDAGVDWQTISVRKAPNPCRERRDARVLHRLEQILFRPGGQGEAAWRYGPVSYITLEIPEPGTERPDKGQQAARQEKTLKERLAEETDGCVYKVVGGCGGPMEKDHIFPRSRGGPDVRVNLVAACNLHNEMQKANQTPFEWLGSTAQWGAFREHVQGLKIGERKKKILLNETDQYPESDPTPLARVGARPRQFLVALRELFRKYGLTPPRADYHLGEPLLQRVDGRLTHLYRLSWCKKSDGSDNFPYPKDRSTLFNHAEDAAILAAIPPHTWREQAVCWRDKRPNWKGEWVERGGLVVPSLAPDWAGFLQQRRQPVVRILGRYPVTWRSQFADLTFWRQPLVDATRLKRFKLLKDIQRKDFPNIVSSRVRSKVEEIAASVGVGEKGTLAEAMARQLAGEGAKRAAVEQELPRAAQELEQRFPGLRRVQVYSQKGGSVAVIDPGDGPLRKVQIKPASEGVVIWQQLEGKKTKKLKTHISVLRPRPLQRFGMPRVDPPIPPGATTLGQLHRHQIIWLEAQPDRPAGYYRVTKCQEVGVTLVPEEAVPAEIQRRLQIQGAAKSGGEATDQEGDGLTKVTLGRQRLADYFLKRRSNASRT

SEQ ID NO: 8997 - protein, 1011 aa, synthetic construct
  REGION 1..1011: note = Synthetic
VLARTLPRLQERIQEFLSRTRIGIDFGEHFGGIAVVRGNEILHAETFLDFHEATLEQRRILRRGRRSRHAKKMRINRLRSWVLRQKLPNGQRLPDPHGVMRDLRYMPQPGVYKQKGVDPRTAPSWIKLAKDGKTDAEGFVRALTLIFQKRGYKWDGDELEGMSDAKLKDFLQTARIPSDDASLASDIRENIDRRRQSPNDPARGRTKVSPEELEAFLQLACERGKRGPLPRRAEHRSVKIEELKAAVEGFTTSQGIPAGQKERWKKQLCGLLNKVLRPARFENRLKTGCAWCGKATPRKAKVREIAYRAAVQNLRARDGFQLRPLNDDEKKIFVGWWTDRSTAPGVDAIVKRIEKLNREQKKMARQFHDLLKNEKPKGRTSLCVDHLKMAAQGKTMKDAGVHLQTIAPRKAPNPCRERRDERVLHRLAQILFKPGAQCEAAWRYGPIQYISLEIPEPDTERTPKGKLTERQEMTLKERLAEETEGCVYKALGGCGGEMDKDHVFPRSLGGPDVRFNLAAACMAHNKEKGSKTPYQWFGDRSGQWQAFEARVQKLKIPERKKKILLNQTDEYPEGDPTPLARVGSRPRQFVVALRKMFEKHGVAPPRLDYHLGEPLVQRIAGRETSHFRLSWCRKPDGSENFPYPKDRSSLANHAQDAAILAAIPPHTWRERTLCQKGERPSRSGEWKERPGLAYLELAPDWPAFYAGREKPLIRILGSYPVNWKTKFADLTFWREPEHDTPRVKRYKLLRDIQRKDFKNIVSDSVGKMVEDIAAEIELGEKDTAVTALARRLAEPAVKQAMLEWDSNPKNDVQKRDKQMKKVWGAETEREIPRAMEELERRYPSLRRLQVSSQKGGTLARVEPEDGPLRKVQIKPASEGVVVWQQPRKKGKPKVNISILRPKPLQKFGLPRVDPPIPPGVTILGQLQRHQIIWLGQDLERLAGFYRVAKCQKTGVTVQPEEAVPAEIARRVNLRLDSKSADEAEGDEKATWTLGKRALTEYFEEKRRPSVR

SEQ ID NO: 8998 - protein, 1033 aa, synthetic construct
  REGION 1..1033: note = Synthetic
VASNPHLGSAKGKGIRAVSEKAARNHSCGVAVVTTGTSLLSERIHHFLSSVRVGIDFGEHAGGMAVVCGNEVLHAETFLDFHEATLEQRRTLRRGRRSRHAKKMRLARLRSWVLRQQLPAEGERLPDPYRVMREPRFMVQPGVYRQAGIDPKDRPSWVQLTKEGKTDAAAFVRALTLVFQKRGYKWDSIALEQMADVALKEFLNSARIPADDPQLSDQVRSQIERRRTDPDSPLRGKKKISPEELEALLRLACERGKQPPRPRVAEHRSVKESEVRGIVDGFAKSSGLASAEIERWKRELCGLLNKVLRPARFDNRLKTGCSWCGKATPRKWKFRELAYRAAVNNLRVKENFRQRPLTEEEKKFFLEWWANPEHAPGADAIANRISKLNPDQKKMARQFHDLLKNPRPSGRTSLCAEHLKMAADGKTMRDAGVDWQNIAVRNAPNPCGEQRDMRVLRRLEQILFKPGQGGQPPWRFGSVSFINLEIPEPDTERPAKGTQAERKVESFKDRLAAESDGCIYRILGNCAGEMHKDHIFPDSRGGPDRWENLATACDAHNTQKDARTPYEWMGNGTQNGHWEGFQKFVQNLKISERKKRILLSESSEFPEGDPTPLARIGARPRQFIVALRKMFRKYGVPLPRLDYVLNEPLVQRIRGKETHDLRFSWFVTRDGEENYPYPKDRSSLFNHAEDAAILAACPPHTWRPLIWCHTADRKSRNGEIRPRPGLAVPELAPDWAGYMAKREKPIVRVLGNYSINWRTKFADQTFWRRPSVLDEKRIIQSKLLWKITREDLPKIVSPAMRELVRAIAGSVGLAEKGSIAEAVARQLAGANAKRSAVEQELPRAQETLERNYPRLRRVQVYSQKGGALARVNPSDGPARKVQIKPASEGVIVWQHEEKGKLKTEISLIRPRPLQRFGFPRIDPQIPSGALVMGRLCRHQIIHLTGLPDRPQGFYRVTKCQANGITVQPEEAVPAEILLRTGIKLDKPKESENDEDEAEKLSFTLGKQALLEYFFHKKEQNVAPASPESAARNS

SEQ ID NO: 8999 - protein, 994 aa, synthetic construct
  REGION 1..994: note = Synthetic
MAIAASPLLADRIQEFLSTVRVGIDFGEHAGGIAVVRGNEVLHAETFLDFHEADLEQRRILRRGRRSRHAKKMRLARLRSWALRQDLPDGQRLPDPYKLMRNPAYMVQPGVYKQKGVDPKASLSWVEVAKSGKRDAAGFVRALTLIFQKRGYKWDAVDLEQMSPSKLKEFLLSARIPSSDRTLSDQVRARIEKFKIEPEAATASRIKVSAEELEMCLQLACERGTKPARPRVAEHRSVKEADVREVVDGFAKSAGIPQIQAERWKKELAGERGLLNKVLRPARFDNRLKTGCSWCGKATPRKGKFRELAYRAAINNLRIRENFRQRPLHDSEKKIFLDWWADREKAPGVDAITKRLLKINSQKKIARQLYDLLKNDKPTGRTSLCFEHLKMAAEGKSMKDAGVDWQNVAIRRAPNPCGERRDARVLHRLEHILFKAGQFGETAWRFGRVSFINLEIPEPDTERAAKGTQKERKLESLKDRLAAETDGCVYKLLGGCGGEMDKDHIFPRSRGGPDVQSNLVASCASHNKAKDNRTPYEWLVSGNGHWLTFSQCVNKLAVSERKKKILLNETGEYPDNDPSSLARIGARPRQFVVALARLFQRYGVAAPRLDYRIGEPLVQRIKGSETHHFRFSWFVTPDGESNFPYPKNRASLFNHAEDAAILACIPPHTWRDRVLRYTADRPNRSGEIKPRPGLAIPELAPDWAGYAKTRSKSLLRILGSYPVTWKSKFADLTFWREPEKDAAKLKAYKLLQNIQRKDFVRISQPMRSRIESIADSIGLGEKGSIAEAVARKNAGSGKKRSDIERELPQAQEELERKYPEIRRVQISSQKGGTIIVVRPADGPARKVQIKPASEGLVVWQQHGKNRIGISVLRPRPLQAFGIPRIDPPIPVGASIIGQLRRHDVIWVNGEPDRPEGFYRVTKCQANGVTLQPEEAVPAEILRRAGIKVENDGKDALAKDEAEKVQFPLGKQALADYFADKKKHNGRPAKSDSST

SEQ ID NO: 9000 - protein, 994 aa, synthetic construct
  REGION 1..994: note = Synthetic
MAIAASPLLADRIQEFLSTVRVGIDFGEHAGGIAVVRGNEVLHAETFLDFHEADLEQRRILRRGRRSRHAKKMRLARLRSWALRQDLPDGQRLPDPYKLMRNPAYMVQPGVYKQKGVDPKASLSWVEVAKSGKRDAAGFVRALTLIFQKRGYKWDAVDLEQMSPSKLKEFLLSARIPSSDRTLSDQVRARIEKFKIEPEAATASRIKVSAEELEMCLQLACERGTKPARPRVAEHRSVKEADVREVVDGFAKSAGIPQIQAERWKKELAGERGLLNKVLRPARFDNRLKTGCSWCGKATPRKGKFRELAYRAAINNLRIRENFRQRPLHDSEKKIFLDWWADREKAPGVDAITKRLLKINSQKKIARQLYDLLKNDKPTGRTSLCFEHLKMAAEGKSMKDAGVDWQNVAIRRAPNPCGERRDARVLHRLEHILFKAGQFGETAWRFGRVSFINLEIPEPDTERAAKGTQKERKLESLKDRLAAETDGCVYKLLGGCGGEMDKDHIFPRSRGGPDVQSNLVASCATHNKAKDNRTPYEWLVSGNGHWLTFSQCVNKLAVSERKKKILLNETGEYPDNDPSSLARIGARPRQFVVALARLFQRYGVAAPRLDYRIGEPLVQRIKGSETHHFRFSWFVTPDGESNFPYPKNRASLFNHAEDAAILACIPPHTWRDRVLRYTADRPNRSGEIKPRPGLAIPELAPDWAGYAKTRSKSLLRILGSYPVTWKSKFADLTFWREPEKDAAKLKAYKLLQNIQRKDFVRISQPMRSRIESIADSIGLGEKGSIAEAVARKNAGSGKKRSDIERELPQAQEELERKYPEIRRVQISSQKGGTIIVVRPADGPARKVQIKPASEGLVVWQQHGKNRIGISVLRPRPLQAFGIPRIDPPIPVGASIIGQLRRHDVIWVNGEPDRPEGFYRVTKCQANGVTLQPEEAVPAEILRRAGIKVENDGKDALAKDEAEKVQFPLGKQALADYFADKKKHNGRPAKSDSST

SEQ ID NO: 9001 - protein, 984 aa, synthetic construct
  REGION 1..984: note = Synthetic
MPITEKLRAHISEFLPTLRLGIDFGEYAGGIALVRGNDVIHAETCLDFHSATIEQRRILRRGRRSRHARKMRLARLRSWVLRQRVNGKRLPDSYAVMHDPRFMVQPTVYRSSGVVPQEVPSWIDFVKQGRGGAAAFVRALTLIFQKRGYKWDAIALDEMSDSKLKDFLLTARLPAGDRGLLDQIRLQIKRRRDDPSHPVRGKTKVPPEELEILLSQAVERGKQPPRPRMAEHRSVKEAELRAVVDGFARSSGLPDDVSNRWKTELCQLLNRSLRPARFNNRLKSGCAWCGKSTPRKARVRELAYRAAVNNLRIREGFRTRPLTIKEQEPFLEWWGNAEHAPALKTIQKRLSQLGTDQEKMARQFHDLLTNKTPKGRASLCIEHLKMAAQGKTLKDAGVPWQTIAVRRAPNPCGEARDERILRRLEALLFHPGRRGPQAWRHGPVSIINLEIPEPATEQSAPGQQTARKVESLKERLENESQGCIYKVLGGCSGEIHKDHVFPRSRGGPDLQMNLVAACNAHNDEKGDRTPYEWLQGPHSQRWKQFAAHVRSLSLPETKKRILLSLNPDGTHADDYPSEDPTPLARIGARPRQFVIKLGELFARYGVEPPRLAYELGKPLVQRIRGSETHWYRLSFHKTPDGQLNFPYPKDRSTLFHHAEDAALLASVPPHTWRPLVRIHTARRLLLSGNEGEKAGLVTPELAPNWAAFLQNRRRPLVHILGRYQISWKNKFADLTFWREPMADTPRIKRSKLLKDICGEDIKNIYSPQFRPILQQFADSVGLGPKETLAHALARQMAGPNAKRKEIQLRLPQAEEELSRRFPPRRRLQVFSQKGGTIALIKPADGPPRKIQIKPASEGLILWQVEKARKRDSFETQISILRPLPLLRLGFPRIDPPLPAGAREVGRLYRHQLIWLDARPDRPAGFYRVTKCQLVGATVVPEEVIPKEIVRRLEGYASEVRSEEDDSRSAPALTLGKQELLKYFH

SEQ ID NO: 9002 - protein, 994 aa, synthetic construct
  REGION 1..994: note = Synthetic
MLPPRLQQRITHFLTTVRVGVDFGEHAGGIAVVKGNEVLHAETFLDFHEATLEQRRILRRGRRTRHAKRMRLARLRSWVLRQKLPNGEPLPDPYRVMRDPKFMVQPGLYRQQGCNPQATPSWVQLTREGKADAEGFVRALTLIFQKRGFKWDAIALEEMNDAKLKEFLQSARIPTGDPSFADQVRAQIARRRTDPENPRWGIKSKRVGPEELEALFQVACRRGNEPPRPRMAEHRSVKEAELRGVVEGFEQAVGLPNQISDRWKRELCGLLNKVLRPARFENRLKTGCAWCGKATPRKAKVREIAYRAAIHNLRVREGFGERKLTDSEREAYLKWWADPANAPGVDAISKRLKKMNPQQEKMARQIHDLLKNQDPKGRASLCKAHLQMAADGKTMKDAGVEWQTISVRKAPNPCRERRDERVMRRLEQILFQPGQKGPGAWRHGPVSFITLEVPEPDTERVGKGQQTQRQEETLKERLVDESGGCIYRVIGECAGETEKEHIFPRSREGPSVRMNLVATCNKHNKEKDNRTPYEWLAGDAGNSERWKAFASHVVNALKLPERKKKILLNDEPNYPEGDPTPFARVGARPRQFVVELGKVFARRGVPVPQVAYKVGEPLVQRVRGSETHFFRFSWCKKADGSQNFPYPKNRSTLFSHAEDAAILAGMPPHTWREHAKCHTAERPNFRGEMKARPDLVVPELAPDWASFLQARHKPFVRILGRYPVNWKSAFADQTFWRDPEDLQATKIRRSKLVRDLTQKDLPKIASSQAKAKVQPIVEGAGLGPKGTIAEAVASQMAGPQAKKAAIPQAIERLEADHPELRRVQVSSQKGGTLAQIAPDDGPMRKVQIKPATDGAIVWQRMEGKKKKALRTHISLLRPRPLQRFGFPRVHPAIPPDATILGQFQRHQILWLHGEPDRPEGFYRVTKLQENGITVAPEEAVPLEILRRLKQRGTEVEGAGEDVRDTILLGKEELRRYFERKGEKRGRRAATSTSA

SEQ ID NO: 9003 - protein, 884 aa, synthetic construct
  REGION 1..884: note = Synthetic
MRNPKYMVHPGVYDKEGTDPRNSVSWIDLAKRGRADAAGFVRALTLIFQKRGYKWEAIALEEMNDIESREFLLSARIPTGDPAFANQVREQIERRRKDANDPVRGKKKVPPEELEAAFARACERGKKPPRPRVAEHRSVKEAEVRDVVEGFEEAVGLPNAVAERWKKELCGLLNKVLRPARFRNRLKTGCAWCGRATPRRARVREIAYRAAIHNLRVREGFRERKLSEAETEDFRKWWEDPDQAPGVQAIQKRLKKMNPEQEKMARQIHDLLKNKSPEGRASLCKQHLEIAAAGKTMRDAGVEWQSIAARKAPNPCRERRDERVMRRLEQILFLTGKSGTGAWRHGPVSVVTLEVPEPETERAFKGEMKERKESSLKERLIEESGGCVYRVVGECQGELEKEHIYPRSRGGPGVRMNLVATCTRHNKEKDNRTPMEWLKGAAWSVFERHVHSLKLPERKKRLLLNATGEYPEGDPTPFARVGARPRQFVVALGNLFKRRGVAPPLLAYKLGEPLVQRIRGTETHFFRKSWCKKEDGTENFPYPKDRSTLFNHAEDAAILAGVPPHTWREQIKRFTAERPSFKGEIKPRPDLALPQLAPDWAGFLQERKKPLVRILGRYPVTWKSSFADQTFWRDPEDLKVSKLRRSKLVRDLSAKDIAKIAFPSARARVEPIVKDAGLEERGSLVEAIARKIAGKEAKRSVVLQAVPQAAEQMEAQYPQVRRVQVTSQKGGRLAYISPKDGPSRKVQIKPPSEGAVVWRRPQVGKQRPKVYISLLRPAPLLRFGFSRVDPPIPPGATVLGQFRRHQIIFLESELAPPGGFYRVVKLQENGITVQPEEAVPAEILRRTDEEIRGVVVEEDGTETTHIHLGKQALAEYFATRKKNG

SEQ ID NO: 9004 - protein, 884 aa, synthetic construct
  REGION 1..884: note = Synthetic
MRNPKYMVHPGVYDKEGTDPRNSVSWIDLAKRGRADAAGFVRALTLIFQKRGYKWEAIALEEMNDIESREFLLSARIPTGDPAFANQVREQIERRRKDANDPVRGKKKVPPEELEAAFARACERGKKPPRPRVAEHRSVKEAEVRDVVEGFEEAVGLPNAVAERWKKELCGLLNKVLRPARFRNRLKTGCAWCGRATPRRARVREIAYRAAIHNLRVREGFRERKLSEAETEDFRKWWEDPDQAPGVQAIQKRLKKMNPEQEKMARQIHDLLKNKSPEGRASLCKQHLEIAAAGKTMRDAGVEWQSIAARKAPNPCRERRDERVMRRLEQILFLTGKSGTGAWRHGPVSVVTLEVPEPETERAFKGEMKERKESSLKERLIEESGGCVYRVVGECQGELEKEHIYPRSRGGPGVRMNLVATCTRHNKEKDNRTPMEWLKGAAWSVFERHVHSLKLPERKKRLLLNATGEYPEGDPTPFARVGARPRQFVVALGNLFKRRGVAPPLLAYKLGEPLVQRIRGTETHFFRKSWCKKEDGTENFPYPKDRSTLFNHAEDAAILAGVPPHTWREQIKRFTAERPSFKGEIKPRPDLALPQLAPDWAGFLQERKKPLVRILGRYPVTWKSSFADQTFWRDPEDLKVSKLRRSKLVRDLSAKDIAKIAFPSARARVEPIVKDAGLEERGSLVEAIARKIAGKEAKRSVVLQAVPQAAEQMEAQYPQVRRVQVTIQKGGSLAYISPKDGPSRKVQIKPPSEGAVVWRRPQVGKQRPKVYISLLRPAPLLRFGFSRVDPPIPPGATVLGQFRRHQIIFLESELAPPGGFYRVVKLQEHGITVQPEEAVPAEILRRTDEEIRGVVVEEDGTETTHIHLGKQALAEYFATRKKNG

SEQ ID NO: 9005 - protein, 676 aa, synthetic construct
  REGION 1..676: note = Synthetic
IDRWKWELAGGNDARGISRAGLLNKVLRPARFDNRLRTGCAWCGKATPRKARVRELAYRAAVNNLRARENFRPRPLNESEKQVFLDWWSKRETAPGPDAIKARIKKLNPDQDRMARQFHDLLQNEKPKGRASLCQEHLAMAAQGKTMRDAGVDWQRIAVRKAPNPCGERHDARVMRRLENLLFNPLLRGDSAWRYGPVSYISLEIPDPGTEQLEKGKQAERKTDTLTERLAAETDGCAYKVLGSCAGGLDKDHIFPQSKGGPDVRMNLVAACAAHNKEKDNRTPHAWLASEPGRWSAFEQYVQKLGVPERKKIILLNKTPEYPPGDPSPLARIGARPRQFAVLLGKLFAKYDVPLPRVDYRLGETLIQRISGGETHAFRLSWCKKPDGSNNFPYPKDRSSTFNHAEDAAILAAMPPHTWREQVRCWRAERPNAKGEWLPRPGLALPELAPDWAAYLQKRNKPIVYVLGRYPVRWRGKFADLTFWLQPENKDAPRLKRYKQVRNLKQPDFRNVVSDAMRARVERIASEVAYGGKGTISEALARRIAGPEVKKASEVQQKIPEAVEQLETTHPELRRVQVFSQKGGTMAQVRPSDGPMRLVQIKPATDGLVVWRKWEGKKKKSLKTYISLIRPRPLREFGLPRLHPPIRDAERILGQIHRHQIIWLQGRPDRSEGFYR

SEQ ID NO: 9006 - protein, 889 aa, synthetic construct
  REGION 1..889: note = Synthetic
GTSPQDAPSWVSLTQDGKTDAAGFVRALTLIFQRRGYKWDAIALEEMPDAKMKDFLLNARIPAGNTGLADEVKLQIERRRADSTGSFRGKSKVSVEELEGCFLRALERGKKPPRPRLAEHRSVKESDLRAVVEGFGKSASLARETIDRWKWELAGGNDARGISRAGLLNKVLRPARFDNRLRTGCAWCGKATPRKARVRELAYRAAVNNLRARENFRPRPLNESEKQVFLDWWSKPETAPGPDAIKARIKKLNPDQDRMARQFHDLLQNEKPKGRASLCQEHLAMAAQGKTMRDAGVDWQRIAVRKAPNPCGERHDARVMRRLENLLFNPLLRGDSAWRYGPVSYISLEIPDPGTEQLGKGKQAERKTDTLTERLAAETDGCAYKVLGSCAGGLDKDHIFPQSKGGPDVRMNLVAACAAHNKEKDNRTPHAWLASEPGRWSAFEQYVQKLGVPERKKIILLNKTPEYPPGDPSPLARIGARPRQFAVLLGKLFAKYDVPLPRVDYRLGETLIQRISGGETHAFRLSWCKKPDGSNNFPYPKDRSSTFNHAEDAAILAAMPPHTWREQVRCWRAERPNAKGEWLPRPGLALPELAPDWAAYLQKRNKPIVYVLGRYPVRWRGKFADLTFWLQPENKDAPRLKRYKQVRNLKQPDFRNVVSDAMRARVERIASEVAYGGKGTISEALARRIAGPEVKKASEVQQKIPEAVEQLETTHPELRRVQVFSQKGGTMAQVRPSDGPMRLVQIKPATDGLVVWRKWEGKKKKSLKTYISLIRPHPLRVFGLPRLHPPIRDAERILGQLHRHQIIWLQGRPDRSEGFYRVTKCQRGGATVVPEELVPAEIANREGLKLQKERMDGGDGTDDEGLGTISLGKRDLEAYFLSRKEKNAE

SEQ ID NO: 9007 - protein, 1004 aa, synthetic construct
  REGION 1..1004: note = Synthetic
MPSNLEPTLGDRVHAFLSTVRVGIDFGEHTGGIAIVRGNEVLHAETVLDFHEATLEQRRLLRRGRRGRHAKKMRLARLRSWILRQQLPNGARLPDPYEIMRRRKYMAQPGVFESKGTSPQDAPSWVSLAQDGKTDAAGFVRALTLIFQRRGYKWDAIALEEMPDAKMKDFLLNARIPAGNTGLADEVKLQIERRRADSTGSFRGKSKVSVEELEGCFLRALERGKKPPRPRLAEHRSVKESDLRAVVEGFGKSASLARETIDRWKWELAGGNDARGISRAGLLNKVLRPARFDNRLRTGCAWCGKATPRKARVRELAYRAAVNNLRARENFRPRPLNESEKQVFLDWWSKPETAPGPDAIKARIKKLNPDQDRMARQFHDLLQNEKPKGRASLCQEHLAMAAQGKTMRDAGVDWQRIAVRKAPNPCGERHDARVMRRLENLLFNPLLRGDSAWRYGPVSYISLEIPDPGTEQLGKGKQAERKTDTLTERLAAETDGCAYKVLGSCAGGLDKDHIFPQSKGGPDVRMNLVAACAAHNKEKDNRTPHAWLASEPGRWSAFEQYVQKLGVPERKKIILLNKTPEYPPGDPSPLARIGARPRQFAVLLGKLFAKYDVPLPRVDYRLGETLIQRISGGETHAFRLSWCKKPDGSNNFPYPKDRSSTFNHAEDAAILAAMPPHTWREQVRCWRAERPNAKGEWLPRPGLALPELAPDWAAYLQKRNKPIVYVLGRYPVRWRGKFADLTFWLQPENKDAPRLKRYKQVRNLKQPDFRNVVSDAMRARVERIASEVAYGGKGTISEALARRIAGPEVKKASEVQQKIPEAVEQLETTHPELRRVQVFSQKGGTMAQVRPSDGPMRLVQIKPATDGLVVWRKWEGKKKKSLKTYISLIRPHPLRVFGLPRLHPPIRDAERILGQLHRHQIIWLQGRPDRSEGFYRVTKCQRGGATVVPEELVPAEIANREGLKLQKEPMEGGDGTDDGSLGTISLGKRDLEAYFLSRKEKNAE

SEQ ID NO: 9008 - protein, 1070 aa, synthetic construct
  REGION 1..1070: note = Synthetic
VQAAPQTGLGIRKGKGSWCARPSESHHDILRFARPAMPNPRLAKRINEFLPQVRVGIDFGEGAGGIAVVRGQKILHAETYVDFHGATLEQRRQLRRGRRTRHAKKMRLARLRSWVLRQKLPGGSRLPDPHVVMAEKRFQVQPGVFQIAGQNPLAAPSWVHLAKEGKVDAQGFVKALTLIFQKRGYKWDAIALEEMTDARWKDFLTTARIPNDELQASVTHQIELRKDDPSNPKRGKTKIPPDELLDLLRKARERGNLPPEPRVAEHRSVKETELREVIAGFGKAAGIPTQTVERWQRELCGGATPQGRPTPGLLNKVLRPARFENRLKTGCAWCGKPTPRKSKVRYIAYAAAVCNLRAREGRRVRRLNDQELEFFWSWWRLGERAAAPSTDAPEVTGCSPQAQSAQRRAEKGPPKLAGIQSHLRRLGAQEKMARQIFDLLWNDEPQGRASLCKQHLEMAAKGMTMKEAGVEWQTIAVRRAPNPCGQQHDARVLHRLEQILFRPGKTGERAWRYGPVQFISMEVPKPQTEQARKGEQKERKVESFTERLNKETGGICIYCDPAHPRPAEDKDHIFPQSRGGPDVWDNLVPACKSCNTEKGDLTPFEWFGRRDAQRWAAFALRVEELARKGVPGPGLGEGAKERGAAPHICISERKRALLLSQEPDFPENPTALAHVGSRPRQFLVEIRRLFESRGVKPPRAECQLGEPVAQRIDGRTTSQLRKSWLRKEGDALHNFPAKDRWDLANHAQDAALVAACPPHTWRETIFRHRALRPNREGKWVEQPELAVPELAPDWAEYMASRAWPLVQVLGRYPVNWKRSFADQTLWRKPQAREESELSVSRPIESIKVRQIRRVQSLYYRPRLAELAKRLGLPENKTLPIEELQKEFPGLRHLKLSVPKGGKVFPVRPGDGPLRKMQAKPAGEGLILWDLPAERGRKAAPRVSLLRPKPLQKFGIPRVDPPLEPGARILGKLERHDMIWLDRSLGRPDGFYRAKEFSDSGIVALPENAVPDELARKMSLKRADTDTAPRAASREIKLGKKDLAAYFASLSGEDRDAPSVDEPFDAGEPSV

SEQ ID NO: 9009 - protein, 764 aa, synthetic construct
  REGION 1..764: note = Synthetic
GRPTPGLLNKVLRPARFENRLKTGCAWCGKPTPRKSKVRYIAYAAAVCNLRAREGRRVRRLNDQELEFFWSWWRLGERAAAPSTDAPEVTGCSPQAQSAQRRAEKGPPKLAGIQSHLRRLGAQEKMARQIFDLLWNDEPQGRASLCKQHLEMAAKGMTMKEAGVEWQTIAVRRAPNPCGQQHDARVLHRLEQILFRPGKTGERAWRYGPVQFISMEVPKPQTEQARKGEQKERKVESFTERLNKETGGICIYCDPAHPRPAEDKDHIFPQSRGGPDVWDNLVPACKSCNTEKGDLTPFEWFGRRDAQRWAAFALRVEELARKGVPGPGLGEGAKERGAAPHICISERKRALLLSQEPDFPENPTALAHVGSRPRQFLVEIRRLFESRGVKPPRAECQLGEPVAQRIDGRTTSQLRKSWLRKEGDALHNFPAKDRWDLANHAQDAALVAACPPHTWRETIFRHRALRPNREGKWVEQPELAVPELAPDWAEYMASRAWPLVQVLGRYPVNWKRSFADQTLWRKPQAREESELSVSRPIESIKVRQIRRVQSLYYRPRLAELAKRLGLPENKTLPIEELQKEFPGLRHLKLSVPKGGKVFPVRPGDGPLRKMQAKPAGEGLILWDLPAERGRKAAPRVSLLRPKPLQKFGIPRVDPPLEPGARILGKLERHDMIWLDRSLGRPDGFYRAKEFSDSGIVALPENAVPDELARKMSLKRADTDTAPRAASREIKLGKKDLAAYFASLSGEDRDAPSVDEPFDAGEPSV

SEQ ID NO: 9010 - protein, 1048 aa, synthetic construct
  REGION 1..1048: note = Synthetic
MLTPALQQRINDFLPKVRVGIDFGEHAGGIAVVQGNKVLHAETYVDFHATTLELRRQLRRGRRTRHAKKMRLARLRSWVLRQRLPDGSRLPDPYQVMHHARFQVQPGIFQTPGTNPAAAPSWVDLAKQGKVDAAGFVRALTLIFQKRGFKWDAIALEEMTDSRLKDFLETARIPSDELYADIRRQIDRRLQDPQDPIRGKTRTPPDELLKLLDAARVRSPQPRIAEHRSVKEADLREVIQGFGGAAKLPTETVLRWRRELCGGTTDPGRVKPGLLNRVLRPARFENRLRSGCAWCGKPTPRKSKVRHVAYAAAVCNLRVREGRRVRPLAPSELEVFWRWWDLRPAAPGGDSPEPSPARGGSLTGPRKATPKLEGIKAHLRRLGAQEKMARQIFDLLWNDQPEGRASLCNHHLEMAAKGATMKDAGVDWQTISVRKAPNPSREQHDARVLRRLEQILFKPGATGQQAWRHGPVQFITLEAPVPETERARKGEQKPRKLETFMERLAKETGGLCIYCDRARPRPVENKDHVYPQSRGGPDVWDNLVPACKACNDEKGDRTPFEWLGGPSSPRWAAFALRVEDLAVKGVPVPPEDGGEKRKDAAAKLIRISDRKRALLLSPEPDYPENPTPLAHVGARPRQFVVALRALFKKYGVEPPRADYQLGEPFVQRAEGRLTSQLRKSWLLKADGKTANFPVKDPWDLLNHAQDAALIAACPPHTWRDTIFCYRAVRPKYAGEGRFVWAEQDGLALPGLAPDWAEYIDRRTWPLVRVLGRYPVGWKHTFADQNFYQDPDKLDDKRLRQHVPLAAFQFSGRGPDQARHPGESRMASEALDKQFRAVAQSMGLKKRQTLPAGKLNEDFPGVRHVIVEKQPGGKLARVHPEDGPPRKVQLKKASEAVVFWVPKGKPLPQLAFSVRWPRPFQKFGVPRHDPALPVGAEIIDVWKRYKAIWLDQTTGQEPGFYRVKEFTASAVTVLPENAVTDELARRLMLKRPKAAAGHSQGKNAKDQGAVEPRAPSADQQLAEAGAELREIDLHRKDIVAYFEGLRSRA

SEQ ID NO: 9011 - protein, 518 aa, synthetic construct
  REGION 1..518: note = Synthetic
MSNSTLQRRLDDFLPRVRVGIDFGEHAGGIAVVQGNRIVHAETYVDFHETTLELRRQLRRGRRTRHAKKMRLARLRSWVLRQKLPDGSRLPDPYLVMREPRFQVQPGVFETPGANPAEAPSWIDLAKQGKADAAGLVRALTLIFQKRGFKWDAIAPEEMTDSRLKDFLETARIPDDELYAEIKGQIERRVKDPHDPVRGKTKTAPEELLKLLDAARARSPQPRIAEYRGVKEADLREVIDGFGEAARLSPELVWRWKRELCGGTTQRGNNKPGLLSKVLRPARFENRLRTGCAWCGKRPLRKSKVRCVAYAAAVCNLRVREGRRVRPLGPPELEVFWRWWKLREAVSETPKPDASSGQDRPATASRKPRPDDAPKLEGIKAHLRRLGAQEKMARQIFDLLWNERPKGRGSLCKEHLEMAAKGRTMKEAGVDWQTVSVRKAPNPSREQHDARVLRRLEQILFRPGKTGEEAWRHGPVQFITLEVPAPETERAAKGEQKPRKLETFMQRLAKETGGVCIY

SEQ ID NO: 9012 - protein, 1044 aa, synthetic construct
  REGION 1..1044: note = Synthetic
VGGPAGRYSDPGKGQGLVAHSTSEERHLLFTHASGATLLTPILREQVNSFLPTLRVGIDFGESAGGIAVVQGNQILHAETYVDFHASDLEQRRQLRRGRRTRRAKKMRLARLRSWVLRQKLPNGTRLPDPYIVMKDRRFHVQPGVFQAPGRNPAVLPSWTDLAKQGKVDASGFVRALTLVFQKRGFKWDAIELAKMTDEKMKGFLQKARVPSDNLAGDIREEIQRRRQDPDSSVRGKKKVSPDELLALLEQARERQPQPRVAEHRSVKEADLRSAVEGFGNSINLPKATIQRWQQELSGLLNKVLRPARFENRLRTGCAWCGKPTPRKSKVRDVAYQAAVHNLRVREGRAIRPLRPEELAEFMKWWQLRGQNVEPQENTSQQKRSRKDGSQIVPKLKAIQSHLKKLGAQEQMARQLYDLLWNEKPQGRASLCSQHLVEAAQGRTMKDVVGEWQHLKVRKAPNPCREQHDARVLHRLEQILFRPETRGEEAWRYGPVRWITLEVPKPQTEQARKGEQKPRKPEPFMERLKKETNSVCMYCDPSNPNSAEDKDHIFPQSRGGPDVWDNLVPVCRTCNTTKGDRTPFEWFGADRDRWLKFAQRVEALVLQGIQVERDDGKGETVRISERKRTLLLSNDAEYPNNPTPLAHVGARPRQFVVALRKLFERRGVAVPSVNYESGTPFIQRIDGRTTAQLRKSWLKKVDGTTDNFPSKNDWDLLNHAQDASLMAACPPHTWRDLIFTHSAERPVWGGSWKQVPGLAVPELAPDWAEYLERRTWPLVKVLGRYPVNWKRTFADQNFYQNPESLDDTRLLQHVQLRQLQHSGTGPDDRRHPAETEIVSPALDREFRALASSLGLKKKQTVPVEKLNDRFPGIRQVKVRKQPGGKLACIQPKDGPPRKVQLKGASDAVVFWVSNNEPLAKLRWSIRHAAIFQVFGVPRYEPPIPGNARIIATWPRHRFIRLGESTGHTPGYYRVKEFDDDKVTVLPENAVTNALAERLNLKKQRENDRQTESKVKAEEIKLGKAVLVRYFESIGENYHDPGTTS

SEQ ID NO: 9013 - protein, 630 aa, synthetic construct
  REGION 1..630: note = Synthetic
VGGPAGRYSDPGKGQGLVAHSTSEERHLLFTHASGATLLTPILREQVNSFLPTLRVGIDFGESAGGIAVVQGNQILHAETYVDFHASDLEQRRQLRRGRRTRRAKKMRLARLRSWVLRQKLPNGTRLPDPYIVMKDRRFHVQPGVFQAPGRNPAVLPSWTDLAKQGKVDASGFVRALTLVFQKRGFKWDAIELAKMTDEKMKGFLQKARVPSDNLAGDIREEIQRRRQDPDSSVRGKKKVSPDELLALLEQARERQPQPRVAEHRSVKEADLRSAVEGFGNSINLPKATIQRWQQELSGLLNKVLRPARFENRLRTGCAWCGKPTPRKSKVRDVAYQAAVHNLRVREGRAIRPLRPEELAEFMKWWQLRGQNVEPQENTSQQKRSRKDGSQIVPKLKAIQSHLKKLGAQEQMARQLYDLLWNEKPQGRASLCSQHLVEAAQGRTMKDVVGEWQHLKVRKAPNPCREQHDARVLHRLEQILFRPETRGEEAWRYGPVRWITLEVPKPQTEQARKGEQKPRKPEPFMERLKKETNSVCMYCDPSNPNSAEDKDHIFPQSRGGPDVWDNLVPVCRTCNTTKGDRTPFEWFGADRDRWLKFAQRVEALVLQGIQVERDDGKGETVRISERKRTL

SEQ ID NO: 9014 - protein, 599 aa, synthetic construct
  REGION 1..599: note = Synthetic
MLTPILRERVNSFLPTVRVGIDFGESAGGIAVVKNNQILHAETYVDFHLTDLEQRRQLRRGRRTRNAKKMRLARLRSWVLRQKLPNGARLPDPYVVMSDPQFQVQPGIFQTTGRNPATVPSWIDLAKQGKVDAKGFVRALALVFQKRGYKWDAIELANMNDVKLKDFLLSSRVPDSLAEQIRAEIQRRQEDPDNPIRGKKKVPLTELLDELGKAIHRGSEPRKAEHRDVKVADLCSVIEGFGGSINLSKDTIQRWQRELCGLLNKVLRPARFDNRLRTGCAWCGKPTPQKIKVREVAYEAAVHNLRVREGRAIRPLKPEELAVFAQWWRLRGQAGESQQGGPEQKPARNDRSQAVPKLKAIQSHLKKLGAQEQMARQISDLLWNEKPRGRASLCQQHLIEAAQGRTMKDVVGEWHKVKIRKAPNPCREQHDARVLHRLEQILFKPGKNGPDAWRYGPVQLITLEVPKPQTEQARKGEQKLRKPESFMERLRKETAGVCMYCDLSTPLPAEDKDHIFPQSRGGPDVWDNLVPVCRGCNTAKGDRTPFEWIGPDGQRWQRFTKRVEDLAVRGVRVEREDGKEETVRISERKRALLISQDAD

SEQ ID NO: 9015 - protein, 989 aa, synthetic construct
  REGION 1..989: note = Synthetic
VGIDFGESAGGIAVVQGNRILHAETYIDFHASDLEQRRQLRRGRRTRRAKKMRLARLRSWVLRQKLLNGARLPDPYAVMKEPRFHVQPGIFQTTGSNPATVPSWIDLAKQGKVDASGFVRALTLIFQKRGFKWDAIELEKMTDEKLRDFFQKARVPDDDLAGTIRNEIERRRENPDDPARGRKKVQPDQLVDLLNQARGRKPQPRVAEHRSVKEADVRSVVEGFGNSINLSKDTIQRWQRELCGLLNKVLRPARFDNRLKTGCAWCGKPTPRKAKVREIAYEAAVRNLRVREGRFLRPLRSEELAVFKQWWALRGQTGESQQDHSEKKRSRKTGWQTVPKLKAIQTHLKKLRAQEQMARQISDLLWNEKPQGRASLCSQHLSEAAQGKTMKDVVGEWHTVKVRKAPNPCREQHDARVLHRLEQILFKPGRNGPDAWRHGPVQFVTIEVPKPQTEQARKGEQKLRKPESFMDRLKKETDSRCIYCDSSNPHLAEDKDHIFPQSRGGPDVWDNLVPVCRSCNMAKGDRTPFEWIGADTERWRRFIERVEGLAVRGICVEGDDGTKQTIRVSERKRTLLLSRETDYPENSTPLAHVGARPRQFVVALRELFEGRGVAAPTVNFETGMPFVQRIDGRTTSQLRKSWLKKADGTDNFPLKNDRDLLNHAQDAALIAACPPHTWRETIFRSRAIRPRWDGTMTEQDGLAAPELAPDWVEYLDRRTWPLVKVLGRYPISWKRKFADLTFSQNPDSLDDKRLVQYLPLDDLAHSGKGPDERRHPAETEIADPSLDKKFRALATQLGLKKKQTIPEKNLREHFPGVRHVKIKKQPGGRQVRVAPWNGPARKVEIKAASEAVVFWIENGETKTKLRMSVRWPTILQDWGLSRYEPPIPGGATVLATWVRHQFIRLGPETGYTPGFYRVKEFDGSSVTLLPERAIPDALAMRVNLRKRKNGQGESQESASAQEIKLGKAVLAKYFESLNGGKHHDPGTGS

SEQ ID NO: 9016 - protein, 1007 aa, synthetic construct
  REGION 1..1007: note = Synthetic
MLTPILRERIISFLPTVRVGIDFGESAGGIAVVQGNRILHAETYIDFHASDLEQRRQLRRGRRTRRAKKMRLARLRSWVLRQKLLNGARLPDPYAVMKEPRFHVQPGIFQTTGSNPATVPSWIDLAKQGKVDASGFVRALTLIFQKRGFKWDAIELEKMTDEKLRDFFQKARVPDDDLAGTIRNEIERRRENPDDPARGRKKVQPDQLVDLLNQARGRKPQLRVAEHRSVKEADVRSVVEGFGNSINLSKDTIQRWQRELCGLLNKVLRPARFDNRLKTGCAWCGKPTPRKAKVREIAYEAAVRNLRVREGRFLRPLRSEELAVFKQWWALRGQTGESQQDHSEKKRSRKTGWQTVPKLKAIQTHLKKLRAQEQMARQISDLLWNEKPQGRASLCSQHLSEAAQGKTMKDVVGEWHTVKVRKAPNPCREQHDARVLHRLEQILFKPGRNGPDAWRHGPVQFVTIEVPKPQTEQARKGEQKLRKPESFMDRLKKETDSRCIYCDSSNPHLAEDKDHIFPQSRGGPDVWDNLVPVCRSCNMAKGDRTPFEWIGADTERWRRFIERVEGLAVRGICVEGDDGTKQTIRVSERKRTLLLSRETDYPENSTPLAHVGARPRQFVVALRELFEGRGVAAPTVNFETGMPFVQRIDGRTTSQLRKSWLKKADGTDNFPLKNDRDLLNHAQDAALIAACPPHTWRETIFRSRAIRPRWDGTMTEQDGLAAPELAPDWVEYLDRRTWPLVKVLGRYPISWKRKFADLTFSQNPDSLDDKRLVQYLPLDDLAHSGKGPDERRHPAETEIADPSLDKKFRALATQLGLKKKQTIPEKNLREHFPGVRHVKIKKQPGGRQVRVAPWNGPARKVEIKAASEAVVFWIENGETKTKLRMSVRWPTILQDWGLSRYEPPIPGGATVLATWVRHQFIRLGPETGYTPGFYRVKEFDGSSVTLLPERAIPDALAMRVNLRKRKNGQGESQESASAQEIKLGKAVLAKYFESLNGGKHHDPGTGS

SEQ ID NO: 9017 - protein, 513 aa, synthetic construct
  REGION 1..513: note = Synthetic
MLTPILRERIISFLPTVRVGIDFGESAGGIAVVQGNRILHAETYIDFHASDLEQRRQLRRGRRTRRAKKMRLARLRSWVLRQKLLNGARLPDPYAVMKEPRFHVQPGIFQTTGSNPATVPSWIDLAKQGKVDASGFVRALTLIFQKRGFKWDAIELEKMTDEKLRDFFQKARVPDDDLAGTIRNEIERRRENPDDPARGRKKVQPDQLVDLLNQARGRKPQLRVAEHRSVKEADVRSVVEGFGNSINLSKDTIQRWQRELCGLLNKVLRPARFDNRLKTGCAWCGKPTPRKAKVREIAYEAAVRNLRVREGRFLRPLRSEELAVFKQWWALRGQTGESQQDHSEKKRSRKTGWQTVPKLKAIQTHLKKLRAQEQMARQISDLLWNEKPQGRASLCSQHLSEAAQGKTMKDVVGEWHTVKVRKAPNPCREQHDARVLHRLEQILFKPGRNGPDAWRHGPVQFVTIEVPKPQTEQARKGEQKLRKPESFMDRLKKETDSRCIYCDSSNPHLAEDK

SEQ ID NO: 9018 - protein, 493 aa, synthetic construct
  REGION 1..493: note = Synthetic
MLNPALTTRLHDFLPTVRVGIDFGEGAGGIAVVKGNQILHAETYADFHETTLEKRRQLRRGRRTRHSKKMRLARLRSWILRQKLPDGTRLPDPYVVMRTPRFHVQPGVYEKSETDPLKAPSWIDLVKQGRGDAEAFVKALTLIFQKRGYKWDSIALEEMTDSKLKDFLTTARIPNDDLSADVRAQIKRREDDSDDPVRGKSKVSPAELLDLLDKARKRQQQPRQAEHRSVKAAELSEVIAGFGKSADIPASAIQCWQRELCGVTSENGKEKPGLLNKVLRPARFENRLRTGCAWCGKPTPRKAKVRHVAYCAAVCNLRVREGRRVRTLNELESEVFWNWWRLREAALAKAKEQPVNAVEEGTKKPAKGTDAPKHETIKKHLQRLGTQDKMARQISDLLWNENAKGRASLCREHLEMAALGKTMKDAGVEWQTISVRKAPNPCREQHDKRVLHRLEQILFRPGEQATKPGDMAPCSSSHWRCPLCKPSRPARAK

SEQ ID NO: 9019 - protein, 842 aa, synthetic construct
  REGION 1..842: note = Synthetic
MMHPTLSTRLKDFLPTVRVGVDFGEGAGGIAVVKGNQILHAETYVDFHETTLEKRRQLRRGRRTRHSKKMRLARLRSWILRQKLPDGTRLPDPYIVMRAPRFHPQAGVYQKPEVDPLQATSWINLIKQGRGDAEAFVKVLTLIFQKRGYKWDSIALEEMTDSKLKDFLTTARIPNDDLYADVRAQIKRREDDSDDPVRGKSKVSPADLLDLLERARKRQPQPRQAEHRSVKAAELIEVIAGFGKSAEIAPTTIQRWQRELGGTPGEGGTGPPGLLNRVLRPARFENRLRTGCAWCGKPTPRKAKVRYIAYCAAVCNLRVREGRRIRPLNELEKEVFWNWWRSREAALAKAKEQPGKPVEEGAKKPTKGTDAPKHETIKKHLQRLGAQDKMARQISDLLWNENAKGRASLCRKHLEDAALGKTMKDAGVEWQTISVRKAPNPCREQHDRRVVHRLEQILFRPGESGVKAWRYGPVQFITLEVPAPQTEQARKGEMKSRKPEPFMVRLAKETAGVCIYCDPANPRPAEDKDHVFPQSRGGPDVWDNLVPACKACNKEKDNRTPFEWFRDPQRWQAFTARVNELADKGIPAPGEPEDEGKKKTQPPRIIRISDRKRALLLSTDSEYPENPTALAHVGARPRQFVVELGQLFRVRGVKPPRIDYQLGEPLVQRIDGRTTTQLRKSWLKKADETTDNFPPKNRWDLANHAQDAALIAACPPHTWRDTVFCHRAARPNFAGQWVDQDGLAAHDLAPDWAEYMENRTWPLVRVLGRYPVGWKHTFADQNFYQNPERLDDKRLLQYMPLTAFTHSGKGPDDDRHPAETRMVSTRLDKEFRELARDLGIKK

SEQ ID NO: 9020 - protein, 1037 aa, synthetic construct
  REGION 1..1037: note = Synthetic
MMHPTLSTRLKDFLPTVRVGVDFGEGAGGIAVVKGNQILHAETYVDFHETTLEKRRQLRRGRRTRHSKKMRLARLRSWILRQKLPDGTRLPDPYIVMRAPRFHPQAGVYQKPEVDPLQATSWINLIKQGRGDAEAFVKVLTLIFQKRGYKWDSIALEEMTDSKLKDFLTTARIPNDDLYADVRAQIKRREDDSDDPVRGKSKVSPADLLDLLERARKRQPQPRQAEHRSVKAAELIEVIAGFGKSAEIAPTTIQRWQRELGGTPGEGGTGPPGLLNRVLRPARFENRLRTGCAWCGKPTPRKAKVRYIAYCAAVCNLRVREGRRIRPLNELEKEVFWNWWRSREAALAKAKEQPGKPVEEGAKKPTKGTDAPKHETIKKHLQRLGAQDKMARQISDLLWNENAKGRASLCRKHLEDAALGKTMKDAGVEWQTISVRKAPNPCREQHDRRVVHRLEQILFRPGESGVKAWRYGPVQFITLEVPAPQTEQARKGEMKSRKPEPFMVRLAKETAGVCIYCDPANPRPAEDKDHVFPQSRGGPDVWDNLVPACKACNKEKDNRTPFEWFRDPQRWQAFTARVNELADKGIPAPGEPEDEGKKKTQPPRIIRISDRKRALLLSTDSEYPENPTALAHVGARPRQFVVELGQLFRVRGVKPPRIDYQLGEPLVQRIDGRTTTQLRKSWLKKADETTDNFPPKNRWDLANHAQDAALIAACPPHTWRDTVFCHRAARPNFAGQWVDQDGLAAHDLAPDWAEYMENRTWPLVRVLGRYPVGWKHTFADQNFYQNPERLDDKRLLQYMPLTAFTHSGKGPDDDRHPAETRMVSTRLDKEFRELARDLGIKKKATVPTEKLQQMFPGVRHVKVEKQPGGRLARMEPDDGPARKVQLKKASEAAVIWLEKGAPLDQIQMSVRWPAIFRDFGVPRHDPAVPPEAVVLDVWPRYKSIWLDEETGQEPGFYRVKEFTSSDITVLPENAVTDELAKRLNLKKAKAQAAAPAQDGDSPTGEKGAEPEGLLREVKLHRKDLVRYFKALHSAESA

SEQ ID NO: 9021 - protein, 1082 aa, synthetic construct
  REGION 1..1082: note = Synthetic
MLNSALTTRLHDFLPTVRVGVDFGEGAGGIAVVKGNQILHAETYVDFHETTLEKRRQLRRGRRTRHSKAMRLARLRSWVLRQKLPDGTRLPDPYDVMHTLRLHVQPGVYEKAGTDPLKAPSWIDLVKQGRGDAEAFVKALTLIFQKRGYKWDSIALEEMTDAKLKDFLTTARIPNNDLYADVRAQIKRREDDSDDPVRGRSKVSPTELLDLLVRARNRQQQPRQAEHRSVKSAELVEVIDGFGKSAGVPLTTIQRWQRELCGVPGEKGKEKFGLLDRVLRPARFANRLRTGCAWCGKPTPRKKKVQHVAYAAAVCNLRIREGRRVRPLNPADMEKFWHWWRLREAISKRSPAPAFYQEGVDGSDEKKATEAPKLGGIEGYLKRLSAQVKMGRQLFDLLWNDQPTGRASLCRKHLEDAALGKTMKDAGVEWQTISVRKAPNPCREQHDKRVLHRLEQILFRPGESGENAWRYGPVQFITLEVPAPQTEQARKGEMKTRKPEPFMVRLAKETGGVCIYCDSANPRPAEDKDHVFPQSRGGPDVWDNLVPACKACNKEKDNRTPFEWFRDPQGWQAFTVRVNELADKGVPAPVEPEEAGKKKTQPPRFIRISDRKRMLLLSTEPAFPENPTALAHVGARPRQFVVELGQLFRSRGVKPARIDYQLGEPLVQRIDGRTTTQLRKSWLKKADETTDNFPPKNRWDLANHAQDAALIAACPPHTWRDTVFCHRAVRPNFAGKWVDQDGLATHDLAPDWAEYMENRTWPLVRVLGRYPVGWKHTFADQNFYQNPEKLDDKKLLQYVPLVQLKYSGTGPDEKRHPSETEIVSSRLDHEFRDLAHTLVKEREAWIVAHPKPDKEIRKEGQELGLTANHTIPKERLEDSPQFRNVRHVKVQKQPGGKLVRVKPLDGPARKIQAKEASEGAVVWFIPPKLGSKGKPRLKISIAWPMALRKFGVPKFEPAIPPDATIIPLLTTGGLQKVWRRHAMTWLEEDKTRGHPAGFYRVKEFSDGDIKLLPEIAVPTELAQQLGLSKAEISEEEKKKFSERKLGKAELFAYFRSLDSKDHEGQSSTVGHPSDSDSDESAS

SEQ ID NO: 9022 - protein, 1085 aa, synthetic construct
  REGION 1..1085: note = Synthetic
MLTPVLASRLHDFLPAVRVGIDFGEGAGGLAVVKGNQVLHAETYVDFHETTLEKRRQLRRGRRTRHSKKMRLARLRSWILRQKLPDGTRLPDPYAIMRNPRFHAQPGVFEKPGENPLNAPSWIDLVRQRHGDAEAFVKALTLIFQKRGYKWDSIALEEMTDGKLKDFLSTARIPNDELFADVRAQIKRREDDPGDPVRGKSKVPPAELLDLLEKARKRQQQPRQAEHRSVKAAELIGVIAGFGKPAGIPSATLQRWQRELCGFTGENGKEKFGLLNKVLRPARFDNRLRTGCAWCGKPTPRKSKVRKVAYDAAVRNLRVREGRRVRRLNDPELEVFWTWWRLREEASAKAKEQPVKAAEEGARKPAKGTDAPKHETIKKHLQRLGAQDKMARQIFDLLWNEKAKGRASLCAQHLEMGARGATMKDAGVEWQTISVRKAPNPCREGHDKRVLHRLEQVLFRPGESGDKAWRYGPVQFITLEVPAPQTEQARKGEMKPRKLEPFMARLAKETGGVCIYCDPANPRPAEDKDHVFPQSRGGPDVGDNLVPACKKCNTEKDNRTPFEWLQDGQRWEAFTARVNELADKGVPLPGEPEETGKKKTQPARCIWISERKRALLLSTESEYPENPTPLAHVGARPRQFVVELGRLFRGRGVKPPRIDYRLGEPLIQRIDGRTTTQLRKSWLKKADEATDNFPPKNRWDLANHAQDAALIAACPPHTWRDTVFCRRASRPKFEGEGKTIWADQDGLALSELAPDWAEYMERRTWPLVRVLGRYPVGWKHTFADQNFYQNPEQLDDKKLLQYVPLAQLKHSGTGPDEKRHPSETAIVSPRLDHEFRAAAQRLEKEREAWDEAHPKKDKELRKEGQSPGLTPAGTIPQEKLQEVPVLRGIRHVKVQKQPGGKLVRVRPADGPARKIQAKQASVGAVVWFLPSASGSKPKPRLNISIVWPSALRKFGVPKFAPPVPAEATFIPLVTTAGLQRVWRRHAMTWLERDEARGHPAGFYRVKEFSEGNITLLPELAMPTEIAERLGLPKAGISEEAKRAFAERKLGKAELLSYFLSFGDRDHGGFTNAGARGDPSPNGSAG

SEQ ID NO: 9023 - protein, 600 aa, synthetic construct
  REGION 1..600: note = Synthetic
MLTPVLASRLHDFLPAVRVGIDFGEGAGGLAVVKGNQVLHAETYVDFHETTLEKRRQLRRGRRTRHSKKMRLARLRSWILRQKLPDGTRLPDPYAIMRNPRFHAQPGVFEKPGENPLNAPSWIDLVRQRHGDAEAFVKALTLIFQKRGYKWDSIALEEMTDGKLKDFLSTARIPNDELFADVRAQIKRREDDPGDPVRGKSKVPPAELLDLLEKARKRQQQPRQAEHRSVKAAELIGVIAGFGKPAGIPSATLQRWQRELCGFTGENGKEKFGLLNKVLRPARFDNRLRTGCAWCGKPTPRKSKVRKVAYDAAVRNLRVREGRRVRRLNDPELEVFWTWWRLREEASAKAKEQPVKAAEEGARKPAKGTDAPKHETIKKHLQRLGAQDKMARQIFDLLWNEKAKGRASLCAQHLEMGARGATMKDAGVEWQTISVRKAPNPCREGHDKRVLHRLEQVLFRPGESGDKAWRYGPVQFITLEVPAPQTEQARKGEMKPRKLEPFMARLAKETGGVCIYCDPANPRPAEDKDHVFPQSRGGPDVGDNLVPACKKCNTEKDNRTPFEWLQDGQRWEAFTARVNELADKGVPLPGEPEETGKKKT

SEQ ID NO: 9024 - protein, 1060 aa, synthetic construct
  REGION 1..1060: note = Synthetic
MAVNSKLRERLGEFLPLVRVGVDFGEGAGGLAVVKGRTILHAETYVDFHQTTLEQRRQLRRGRRTRHAKKMRLARLRSWILRQRLPDGSRLPDPYPLMRDPRFHVQPGVYAAPGARPTESPSWIALAQQGKTDAAGFVKALTLIFQKRGYKWDAIELEQMTDAKLKDFLATARVPEGLYEKIRGLIEKRKDEPDSPVRGKEKVSPQELLGLLEEARKRPRGPRQAEHRDVKAEDLRKVIDGFGRFAGLPAETIERWQRELCGGTNSNGKRKPGLLNKVLRPARFENRLKSGCSWCGKPTPRKSKVRQIAYAAAVMNLRVREGRARRPLNEAERKIFWDWWEAREAAAAAPTSGRESSSKSENAGKGAARDAPKQAAIGEHLRRLGAQEKMARQLYDLLWNREAKGRASLCRQHLEMAAKGMTMKDAGVEWQTIAVRKAPNPCREQHDARVLHRLEQILFRKGKTGSEAWRYGPVSFITLEVPAPATEQARKGEQKERKPEPFMERLARETGGVCIYCDPANAKPAETKDHIFPQSREGPTVWDNLAPACTACNLEKRERTPWEWLGPTARWAKFEERVLLLASKGVPVREEEDGKGKSKAARFIRISERKRDLLLRREPDYPDNPTALAHVGARPRQFVVGLGEIFTKHGLEPPRVDYQLGKPHVQRIDGSTTAQLRKSWLKQPDGVTDNFPTKDRWDLLNHAQDAALIAACPPHTWRDTVFCRRAIRPNFAGQWVPQDGLAVPELAPDWAEYMARRSWPVVRVLGNYPVGWRSTFADQTFYQRPKQLDDKRLRLHVPLVGLKFKEKSPDAKRSPSETKILNPRVAAEFPALAERLAEERKAWEAAHPKWKREKDLKGEHKKLGLTPGRTVPKEILEKELPGIRHVTVERQKGGAALACVEPRDGPPRKIQLKGASEAVVIWVPKGKPLEKLQLSIRWPAIFRKFGVERLVPHIPPGARILEAWERYKMIWLDEDCGQAPGWYRVKEFSSGQVTVLPENAVTDELAKRLQLKAEKQDAATPGEDAEKQGAKANGASARLKEIQLRKRQLAAYFRSQEGGQ

SEQ ID NO: 9025 - protein, 1060 aa, synthetic construct
  REGION 1..1060: note = Synthetic
MAVNSKLRERLGEFLPLVRVGVDFGEGAGGLAVVKGRTILHAETYVDFHQTTLEQRRQLRRGRRTRHAKKMRLARLRSWILRQRLPDGSRLPDPYPLMRDPRFHVQPGVYAAPGARPTESPSWIALAQQGKTDAAGFVKALTLIFQKRGYKWDAIELEQMTDAKLKDFLATARVPEGLYEKIRGLIEKRKDEPDSPVRGKEKVSPQELLGLLEEARKRPRGPRQAEHRDVKAEDLRKVIDGFGRFAGLPAETIERWQRELCGGTNSNGKRKPGLLNKVLRPARFENRLKSGCSWCGKPTPRKSKVRQIAYAAAVMNLRVREGRARRPLNEAERKIFWDWWEAREAAAAAPTSGRESSSKSENAGKGAARDAPKQAAIGGHLRRLGAQEKMARQLYDLLWNREAKGRASLCRQHLEMAAKGMTMKDAGVEWQTIAVRKAPNPCREQHDARVLHRLEQILFRKGKTGSEAWRYGPVSFITLEVPAPATEQARKGEQKERKPEPFMERLARETGGVCIYCDPANAKPAETKDHIFPQSREGPTVWDNLAPACTACNLEKRERTPWEWLGPTARWAKFEERVLLLASKGVPVQEEEDGKGKSKAARFIRISERKRDLLLRREPDYPDNPTALAHVGARPRQFVVGLGEIFTKHGLEPPRVDYQLGKPHVQRIDGSTTAQLRKSWLKQPDGVTDNFPPKDRWDLLNHAQDAALIAACPPHTWRDTVFCRRAIRPNFAGQWVPQDGLAVPELAPDWAEYMARRSWPVVRVLGNYPVGWRSTFADQTFYQRPKQLDDKRLRLHVPLVGLKFKEKSPDAKRSPSETKILNPRVAAEFPALAERLAEERKAWEAAHPQWKREKDLKGEHKKLGLTPGRTVPKEILEKELPGIRHVTVERQKGGAALACVEPRDGPPRKIQLKGASEAVVIWVPKGKPLEKLQLSIRWPAIFRKFGVERLVPHIPPGARILEAWERHKMIWLDEDCGQAPGWYRVKEFSSGQVTVLPENAVTDELAKRLQLKAEKQDAATPGEDAEKQGAKANGASARLKEIQLRKRQLAAYFRSQEGGQ

SEQ ID NO: 9026 - protein, 590 aa, synthetic construct
  REGION 1..590: note = Synthetic
MLNPKLEERIKGFLPGLRVGVDFGEGAGGIAVVKGNKILHAETYVDFHETTLEQRRQLRRGRRTRHAKKMRLARLRSWVLRQSLPDGSRLPDPYRVMRDPRFHVQPGMFQSPGRDPAQATSWIDLARQGKTDAEGFVKALTLIFQKRGYKWDAIAPEEMTDDKLKDFLATARIPNDELARDIEKQIKRREENPDDPLRGKKKVSPGELRGLLEAARKRDRQPRQAEHRSVKEADLREVIDGFGKAAGLPKELTERWKQELCGGANEKGKLKHGLLSKFLRLARFKNRLRSGCAWCRKATPRKSKVRHVAYVAAVCNLRVRDGRIPPRLNDAEKHVFWNWWELREAAAGKSETEKDAPKEAGIKSHLRRLGAQEKMARQFFDLLWNRDAKGRASLCREHLEQAAKGASMKDAGVDWQTISVRKAPNPCREQHDARVLHRLTMRCDTGRSRSSRSKSLHLKPNRRAWASKRNASRSCSWSGSPKKQAGYAFIAIRGTLTRQSPKTTFSLIPVVARACGTTSSPLVRRATPQSSIRHLGNGLAATIRRDGRRLKHAWKNWRAKVCPPWMKKAATGNPGTRASFGFQSESGASY

SEQ ID NO: 9027 - protein, 555 aa, synthetic construct
  REGION 1..555: note = Synthetic
MFQSPGRDPAQATSWIDLARQGKTDAEGFVKALTLIFQKRGYKWDAIAPEEMTDDKLKDFLATARIPNDELARDIEKQIKRREENPDDPLRGKKKVSPGELRGLLEAARKRDRQPRQAEHRSVKEADLREVIDGFGKAAGLPKELTERWKQELCGGANEKGKLKHGLLSKFLRLARFKNRLRSGCAWCGKATPRKSKVRHVAYVAAVCNLRVRDGRIPPRLNDAEKHVFWNWWELREAAAGKSETEKDAPKEAGIKSHLRRLGAQEKMARQFFDLLWNRDAKGRASLCREHLEQAAKGASMKDAGVDWQTISVRKAPNPCREQHDARVLHRLEQILFKKGKTGDNALRYGPVAFVTLEIPPPQTEQARKGEQKERKPEPFMERLAKETGGVCIYCDPGNPNPPESKDHIFPDSRGGPSVWDNLVPACKACNTAKLDQTPWEWFGRNDTARWAAFEARVEELARKGVPAVDEESGDGKSRNPRFIRISERKRSLLLRREADYPENPTGLAHVGSGPRQFVVGLSNLFVRRGFKPPRIDYQLGGSHASSYQRGCRAC

SEQ ID NO: 9028 - protein, 827 aa, synthetic construct
  REGION 1..827: note = Synthetic
LESGGKPPQSKPAIRDRRYSERRDRIRLRLMPNPKLQERINEFLPQVRVGVDFGEGAGGIAVVKGNVILHAETYVDFHETTLEQRRQLRRGRRSRHGKKMRLARLRSWILRQKLPDGSRLPDPYRVMRDPRFHVQPGVFQTSGRRPADAPSWVDLARQGNTDADVFVKALTLIFQKRGYKWDAIALEEMTDDKLGDFLATARIPNDELAADLEKQIQRREDSPEGPFRGRKKVSPEDLRGLLQAARKRDRQPRQAEHRSVKEADLGGVIDGFGKAAGLPPETVRRWKQELCGVTSEAVKTKPGLLSKILRPARFENRLKTGCAWCGKATPRKSKVRHVAYAAAVCNLRVREGRMARRLNDSEMKTFWSWWELREAAAVASAFGPAGSPENNNAALKVGATREPPREAGIKSHLRRLGAQEKMARQLYDLLWNPKAKGRASLCRQHLEQAAMGKTMKDAGVEWQTISVRKAANPCREQHDARVLHRLEQILFRPGKTGSEAWRYGPVGFITLEVPQPRTERPRKGEQKERKPDSFMDRLAKETGGVCIYCDPAKPKPAETKDHIFPQSRGGPDVWDNLVPACKDHNKEKLDRTPWEWLGNTSRWPAFEARVEELAGEGVLAHDPQDGKEKSRDPRFVRISERKRDLLLRRAPDYPDNPTALAHVGSRPRQFVVGLGELFTERGLKPPRTDYQLGEPHVQRIDGRATSQLRKSWLKKVDERTDNFPPKDRWDLLNHAQDAALIAACPPHTWRDTIFRRRALRPNFAGQWVDQDGLAVPDLAPDWAEYRARRFWPVVRVLGKYPVGWKRSFADQNFYQNPQRLDDKRLLQ

SEQ ID NO: 9029 - protein, 757 aa, synthetic construct
  REGION 1..757: note = Synthetic
AGLPPETVQRWKQELCGVTSEAVKTKPGLLSKILRPARFENRLKTGCAWCGKATPRKSKVRYVAYAAAVCNLRVREGRIARRLNDSEMKTFWSWWELWEAAAVAPAFGPAGSPENKNADPKVGAKREPPKEAGIKGHLRRLGAQEKMARQLYDLLWNPKAKGRASLCRQHLEQAATGKTMKDAGVEWQTISVRKAANPCREQHDARVLHRLEQILFRPGKTGSEAWRYGPVGFITLEVPQPRTEQPRKGEQKERKPDSFMDRLAKETGGVCIYCDPAKPKPAEDKDHIFPQSRGGPDVRDNLVPACKDHNKEKDDRTPWEWLGNSSRWPAFEARVEELAGKGVLAHDPEDGKEKSRNPRFVRISERKRDLLLRREPDYPDNPTALAHVGSRPREFVVGLGDLFTERGLKPPRIDYQLGEPHVQRIDGRATSQLRKSWLKKVDERTDNFPAKDRWDLLNHAQDAALIAACPPHTWRDTIFCRRALRPNFAGQWVDQDGLAVPDLAPDWAEYMARRFWPVVRILGKYPVGWKRSFADQNFYQNPQRLDDKRLLQYVPMEKVKWGGKGPEDQPHPSETRIVAARLDKEFRAAGRESQVEIKPKKRASGEVSADLQDGKVFRPLRKGETLPADALAKKFPGVRHVKVSKNKGGTLARVLPLDGPPRKIQMKEASEAVVVWFAKGRPLDKLSLSIRWPAIFQKFGVERFVPPIPEDATILDTWERHKMIWLDEATGHEPGWYRVKEFDDAQVTVLPENAVTD

SEQ ID NO: 9030 - protein, 783 aa, synthetic construct
  REGION 1..783: note = Synthetic
QAARKRDRQPRQAEHRSVKEADLGGVIDGFGKAAGLPPETVQRWKQELCGVTSEAVKTKPGLLSKILRPARFENRLKTGCAWCGKATPRKSKVRYVAYAAAVCNLRVREGRIARRLNDSEMKTFWSWWELWEAAAVAPAFGPAGSPENKNADPKVGAKREPPKEAGIKGHLRRLGAQEKMARQLYDLLWNPKAKGRASLCRQHLEQAATGKTMKDAGVEWQTISVRKAANPCREQHDARVLHRLEQILFRPGKTGSEAWRYGPVGFITLEVPQPRTEQPRKGEQKERKPDSFMDRLAKETGGVCIYCDPAKPKPAEDKDHIFPQSRGGPDVRDNLVPACKDHNKEKDDRTPWEWLGNSSRWPAFEARVEELAGKGVLAHDPEDGKEKSRNPRFVRISERKRDLLLRREPDYPDNPTALAHVGSRPREFVVGLGDLFTERGLKPPRIDYQLGEPHVQRIDGRATSQLRKSWLKKVDERTDNFPAKDRWDLLNHAQDAALIAACPPHTWRDTIFCRRALRPNFAGQWVDQDGLAVPDLAPDWAEYMARRFWPVVRILGKYPVGWKRSFADQNFYQNPQRLDDKRLLQYVPMEKVKWGGKGPEDQPHPSETRIVAARLDKEFRAAGRESQVEIKPKKRASGEVSADLQDGKVFRPLRKGETLPADALAKKFPGVRHVKVSKNKGGTLARVLPLDGPPRKIQMKEASEAVVVWFAKGRPLDKLSLSIRWPAIFQKFGVERFVPPIPEDATILDTWERHKMIWLDEATGHEPGWYRVKEFDDAQVTVL

SEQ ID NO: 9031 - protein, 781 aa, synthetic construct
  REGION 1..781: note = Synthetic
MRRGFDYGGTEEGRFPWGESSHYSAANTWLTTACITSDLADHLKALAPELVAKRNPEDQEKKFYELVSQRLAWSKEHDIARVLAEHSKGGHENLRFRARGFNFPRQNVWQHLEAIIRHPRHAGLISDVEGFIAALGINPNKQPNEKAASRARDRAIFFYNRKTRFDMERHWAKKVNVCPFARHLDLADPDTRCDLKENLAVRRWSILQFAATNRVELDIIEGKGKTKKKRNILHRLNPNTIKALVAFVEKHHAALEKNDKAAEPKRDDASDLIAADIAAAHGEKVKPSPLTKSDWNKSFHSHLWDLLLTTAANRKQRASLCEESPGKLFDIATANETNFIPESIVSRLRAIGFYDWRRNPGSDFNPYPQVECLLGRRIKRGKQAGVLSPTNQGLLRRIFRECKDKLNGAEAPDYCVVEVIGDPPRNTEQRREREQDMKDRRASRDKRSEEYDLDDHGIASKRRRIQLRDQQHGRCPFTGETLPTSPLDPDLELEHLFPEELGGLSVDENLVLTWRTVNGVKGKRTPLQASQAGLVARANGNDFRFLSWDGMFKNTSDMKWGGKKREIFAWGTKPEEHFDAAGNLKVPEFGNTTRVAQLARQLRAEVARWMNVENQPNEAARRIGTPSGWLAAQARKSWLPAEDYQKNRSNLVHHLIDAAVLAHIPPREGMNHVACGGLFFTEWESIRNEATQRTSFRLLTKALPELSPAPRLRHWFSDRAEYAVCPVLKLRSQSKAKSLGDDTFWRQVEETEPTLAQRTELDVTKIGSPEELLSILQRMGA

SEQ ID NO: 9032 - protein, 788 aa, synthetic construct
  REGION 1..788: note = Synthetic
LPFRERHRAINKGVASKEALGICIRHCVEHRGYDYGGTEEGAFPWGDSPLLSKAAEWLSTAYVTQELADQLQDLGPQLHAGRKEEEQRERFVYLLRDRLAGSRENDIARVLAEHSKGGHDNLRTRARGHNFPRPKVWEHLENIVRRHAHLVDDVEGFLAVLGLDANREPDAKRAAKAKRRAIFSYNRKTRSEMERHWKKKVNICPFAAKLGLDDPEERCAENGDVNIRRWKVLEFAATRRVEIDLTEGRGAAKKRRSFLHRLSANAVGQLLGIVQKHHQAVVARDRAAEPKWDESKSIVLEDILTAWGEKAKPMPETRSDWNRSYFSQLKDLLVPTLSNRKKRASLSAGAAVRLFDLASADGTNYTPEEITERLRKAGFYDWRRDASVDFNPYPQVEVLLGRRIKRGTKRGELSPTCQGLLRRIFAEHQEQLRGKTAPDYCIIEVIGDPPRNALQRAERDQEMKERREKRDKRFEQHSLEDSGVASRRRRITLWEQQKGKCPFTGRELPTNPLDPSLELEHIFPEEMGGLSVDENLALTWRTVNSDKGKHTPLQFAAKLGVPFDQLLAHTKEMRWSGKKREIFAWGTVKENRGDRTSHYNSDGTLRIPDFGNTTRMAQLARQLRAEVMRWMEVDGKPDEAARRIGTPSGWLAAQARKSWLAQNDYEKVRNNLAHHLIDAAVLAHIPPREGMNSIFYKGIFYVEREPVGNEASGITSYRLVTKALPELSPLSRLQHWLPDNGEYAVCPVLKPRRQSKTQSLGDATFWRQVHPEDGTLAQRTVLNPNDIT

SEQ ID NO: 9033 - protein, 864 aa, synthetic construct
  REGION 1..864: note = Synthetic
ALAGRRQKRAWRHCRKNRKRRLHRLKLLFAKHGLPWLDAERMSRAHPFRERFRAINNGVASKEALSICIRHCVMHRGYDYGGTEEGAFPWGESPKFGKATEWLSTAYVTPELKDRLEEIAPLLVAGKNAEEQRKKFADLLRERMEWSQEHDIARVLAEHSKGGHDNLRTPARGFNFPRQKVWEHLETIVRNHAHLIDNVEGFLAVLGLNPNKAANAKEAAKARKRAILFYNRKTRFDMERHWAKKVNTCPFAGKLNGNPDERCAENGDLNVRRWKALEFAAMRRVEVDSIEGKGVTKRKRRFLHTLSAEAVGKLVAFVEKHHAAASPAAAPVWSEGKGITENDIKAASGEKAKPVAETKSDWNASYFTQLKDLLTPTIANQKKRASLSAASAEKLFNLATADGLDFEPGQIITRLRAAGFYDWRRSASVDFNPFPQVELLLGRRVKRGKRRGELSVTCQGLLRRIFAERWEALGGATAPDYCVLEVIGDPPRNALQRAERQQEIAENREKREKLFVEYNMEDSGVASRRRRISLWDQQRGKCPYTGKDLPTNPLDPSLEIEHIFPAEMGGLSVDDNLVLTWRNVNADKRKRTPLQFAQATGTSFDEMLGYTKDMKWNARKREIFAWGTVREERPDRPSQYNADGSLRVPDFGNTTRTAQLARQLRAEIMRWMQVDDKPDEAARRIGTPSGWLAAQARKSWLPAGEYEKVRNNVTHHLIDAAVLAHIPPREGMNSVRCKGIFYVESELVRDSATGEQSCRLLTKALPELSPLSRLERWLPASGEYAVNPVLKPRRESKTQSLGDSTFWKQVRPTEATLAQRTAIKPDAITDADGLFTTLQRMNIPVNLIPGRSALESWLTVATAA

SEQ ID NO: 9034 - protein, 780 aa, synthetic construct
  REGION 1..780: note = Synthetic
ATEWLSTAYVTPDLKDDLERLAPQLLAGKSEDEQRQRFADLLRDRLEWSEKHDIARVLADHNKGGHDNLRTRARGFNFPRRKVWEHLETIIRRHAHLVNDVDGFIATLGLNPNEQPDAQSAAKAKKRAIFFYNRKTRFDMERHWTKKVNTCPFAGKLGGNPDERCAENGDQNVRRWKMLEFAATRRIDVDLTEGKGATKKKRQTRHTLSATATGKLIEFIEKHHAATSPAAAPSWSDGKQLIEDDIKAALGDKAKPTPETKSDWNKAYFTQLKDLLTPTIANRKKRASVAATSAARLFDIASANGTDFTPDNIITRLREAGFYDWRRGASVDFNPFPQVELLLGRRIKHGKNRGELSATCQGLLRRIFAQHRDALGGASAPDYCVLEVIGDPPRNALQRAERDKEMKERRDKRDKLFAQFEMEDTGIASRRRRITLWEQQRGKCPYTGKDLPANPLDPSLEIEHVFPAEMGGLSVDDNLVLTWRDENAKKGKRTPLQYAGASFHAMLANTSDMRWNGHKREIFAWGTKPEHYENGDVKGKLLVTDFGNTTRTAQLARQLRAEIMRWMQVDDKPDEAARRIGTPSGWLAAQARKSWLPADDYEKVRNNLTHHLIDAAVLSHIPPREGMNNVICKGIFYVERQPVTNPQTGEISYRPVTKALPELSPLPRLKHWLPDSGEYAVNPVLKRRRESKTQSLGDSTFWRQVRPDEATLAQRTAINPEKITDADELLATLQRMGIPSKLIPSRSAMETWLAAATATTKAEKDKSIEPLKLNDGTPVK

SEQ ID NO: 9035 - protein, 1020 aa, synthetic construct
  REGION 1..1020: note = Synthetic
AREGWLRSTFERAGLSHALLQGRKADDSSGKWITHPADYRLEREFPPQIGKKTFDHAPSDEAGANICYCGAVLRIHLLQGRSLAPWQIFKALHSAIQKRGYDADLPWKAEQDRKSPAKEEIEKTNAAANEVQKVIDGLPDGYRFPCYLEAMCMSLWDPELPEQTVIRQTHEAGSAKRMVFPRSAVELELIALAAAAAKQLPQLAGHVRDLPYGPAGQRYASYYPDAIAEYKARTGDPLVRGKSTDWEGALSQKIPTFDNRALSACALIPRFHSAKSIPQKLEDGTFDSDSLLPAEVTFLMKLKNFRFDVAGQAEGKFPLSQICEIYESTRKRVIAKGDAAAFKLTKTELGKLIERHGGVALRKDQDAVESPRLSGRSRYSRPALKIVKKLLLSGKTPDEVHADELGALGGNTILTKGLVAEDLRFLQNMKGTTWENFYLPDESLAFVENAGISASDKIRALIGRQNNPIVRHRLELFWKLLRELEEKHGKPDHIALEFVRDDFMGADAKKKLSIFQSERRKAREEARKEVGSGKDGLRYQLMKDQGGQCIYCEAPIGIRDLANCHLDHIVPDKMGGPGSYWNFALCCQTCNDAKLKRTPWQWFHDDHRFGWDAYVSRVRSRTFQLRPKKVRLLTQEDAQELVERYQSLAETAWIARLARTVACLQFGWALNFKDDVRRVIVLPGGLTARVRRKYKLNSLLGQDIADLEQTLKENGDAKTEAEIDKKCRADKRHHALDAMVLSFLPQWTSNPTKRVLVTLPEGIHREYFRNYLDDLVPTNLCFEKSVLEESIYGQRRSHETGDPVATKRMEFGKLGFVMVKQKPVFKPSSLNGHIAKIYDPNLRGILQKFVSDTEPDEAAWKCFSSGFRMPSHKGLGPLVKFVRLIVSSNLKEYKDLSKGDKRPALRKGEMHRGYYVYLDLGGKPRVRPVYAFESISAIRMEIQGKIGAEVIEVIGFFQSGCRVTLKTECSYASGVMPPGDYILNTIEADRSRAIMTSNTGVSSPKILLEKLLQSGFHRKE

SEQ ID NO: 9036 - protein, 1088 aa, synthetic construct
  REGION 1..1088: note = Synthetic
MSHSAASVWSFDIGTGSFGLAVRSGNQFKDVRSLLIPDGFASIDDARTRRRMARTREAHRAREYWLRDSFAKAGLQEAVLTGRRAKKELPGATSGKPKWMTLKGDYRLEREFPPSPGQRTKDGAPSDEAGCEICYNSAVLRIRLLQNQRLEPWQIFKALHSAIQKRGYDPNLPWKAQERGKSKKTDDDEMTTMGRVNEAQKELEQLPEDCQLPCYLEAQLIGLWHPADQTHTEIRQSHHAESTKQRIFLRKTVEEELRALAAAAVKQLPALAPHTEDLLYGPGQAAYASYNNPEARTLFEHRTGTPLIRGKATDWQGVLSQKIPTFDNRALSSCALIPRFHSAKCEPKTLPDGTLVPDSLLPAEVTFLMKLKNFRFALAKGATAGFTVVQIREIFEDRVREATVKKDAEAYRLTKTQLNKIIERCGGVSLLPNQTEVEAPRLSGRSRFSKPALKLIRTLVLSGKSPEELHAEALAEVGANTNPLSGLIGSDLQFLRNIKSSGGSAATWENFYLPDESLSFVENSGVSSSAKIRSLIGRQNNPVVRHRLETFWKLLRELEAKHGTPKHIAIEFVREDFMGDKAKIELARFQKERREARAEARKEAGPGKDGLRYQLLKDQGFVCMYCESPLGLVDLPNCHLDHIVPDKMGGPGAYWNFALCCSSCNAAKGKRTPWQWFHEDHRAGWDAYVARVRARTFQLRNKKVRLLTDEDAPTQVQRYQTLAETAWIARLAQMLVCLHFGWPRNFAGGPRHVVVLPGGLTARVRRKYGLNALLGQDIAALELKLKGDADAKVEAEIDKKCRADKRHHALDAMVLSFLPQWTSDPTKQINLKLPEGINLSSFEYVLKDVEPTFIAMKKPVLRDTIYAARKVKGTSIAASRFEISKLGYGTQTPDGKLKDFSPKRLKKQSQEILDSFISMAIGEFADQNPTADEWAAFASQLKSSPNGPLVRKAMRLSNKPNLSNYKDLSKDGNGAWRTSKEGHRGQWVYVTAKGEPKVVPVLVFESPRIIKKEVQTRLDFAEFIGFFESLCCIEIAKEVEHSSKKIPPGRYTLRTLQSDGRASFDSAGGQPFDDIPLKKLLPCGFARI

SEQ ID NO: 9037 - protein, 836 aa, synthetic construct
  REGION 1..836: note = Synthetic
VEEELRALAAAAVKQLPALAPHTEDLLYGPGQAAYASYNNPEARTLFEHRTGTPLIRGKATDWQGVLSQKIPTFDNRALSSCALIPRFHSAKCEPKTLPDGTLVPDSLLPAEVTFLMKLKNFRFALAKGATAGFTVVQIREIFEDRVREATVKKDAEAYRLTKTQLNKIIERCGGVSLLPNQTEVEAPRLSGRSRFSKPALKLIRTLVLSGKSPEELHAEALAEVGANTNPLSGLIGSDLQFLRNIKSSGGSAATWENFYLPDESLSFVENSGVSSSAKIRSLIGRQNNPVVRHRLETFWKLLRELEAKHGTPKHIAIEFVREDFMGDKAKIELARFQKERREARAEARKEAGPGKDGLRYQLLKDQGFVCMYCESPLGLVDLPNCHLDHIVPDKMGGPGAYWNFALCCSSCNAAKGKRTPWQWFHEDHRAGWDAYVARVRARTFQLRNKKVRLLTDEDAPTQVQRYQTLAETAWIARLAQMLVCLHFGWPRNFAGGPRHVVVLPGGLTARVRRKYGLNALLGQDIAALELKLKGDADAKVEAEIDKKCRADKRHHALDAMVLSFLPQWTSDPTKQINLKLPEGINLSSFEYVLKDVEPTFIAMKKPVLRDTIYAARKVKGTSIAASRFEISKLGYGTQTPDGKLKDFSPKRLKKQSQEILDSFISMAIGEFADQNPTADEWAAFASQLKSSPNGPLVRKAMRLSNKPNLSNYKDLSKDGNGAWRTSKEGHRGQWVYVTAKGEPKVVPVLVFESPRIIKKEVQTRLDFAEFIGFFESLCCIEIAKEVEHSSKKIPPGRYTLRTLQSDGRASFDSAGGQPFDDIPLKKLLPCGFARI

SEQ ID NO: 9038 - protein, 870 aa, synthetic construct
  REGION 1..870: note = Synthetic
MGLWSPESKEETTIRQNHQAGSAKHFIFLRRTVETEVRALIAAAANQLPSLAPHADDLLYGPAQAPYASYKDRQAQERFKERTGDVLIRGKAGDWQGVLAQKVPTFDNRAIDRCSLIPRFHAAKSEPRKLKDGSFDKESLLPAEVTFLMKLKNFRFALPGGDDSGFNLEQIREIFQDRLREVTAKQNAECFKLTKTQLQKIVERAGGVSLLPNQTEVEPPRLSGRSRFSKPALKVVKDLILSGRSPAEAHAHALKELKGNTDPLKGLIPGDLQFLLNVRSAGGLDATWSNFYLPDESLSFVENAGPSADEKIRAVIGRQNNPIVRHRLETFWRLLCELKDQHGLPDHVAIEFVREDFMGPKAKMELAKFQKERRAARAEARKEVGSGRDGLRYQLMNDQGGCCMYCEASLSLADLPNSHLDHIVPDGLGGPGAYWNFALCCAGCNSAKGKRTPWQWFHEDHRPGWDGYVERVRARTFQLRPKKVRLLTQQDAAEHVQRYQTLAETAWIARLAQMVVCLFFGWPRNFAGGQRRVVVLPGGLTARVRRKYNLNSLLGEDIAALERKLNADGDAKAESEIDKKCRADKRHHALDAMVLSFLPQWTSDPSKLVNVRLPDKVNRETIGFQLERVVPTYLCFEKPGLEESFYGERRTKEHKDSVATKRFALKELGYTGINPVFQLKTLTKDVAKILDPMIRGAIQQFISETTPDADAWQHFCQGFRQPGPNNSGSLVKSVRLVVSGDLTEFADLSKGDASPGLRRGDRHRGYYLYADVKGKIRVRPVYVFQSPGKVRKELFAQQGVNVSEIIGFFQSGCAVELDGPVDHPKTPLSPGIYRLNSIRADGYCKVTSGTGVTSEPISVAKFLTAGFRRV

SEQ ID NO: 9039 - protein, 1047 aa, synthetic construct
  REGION 1..1047: note = Synthetic
MARTREAHRAREFWLRQCFEEAGLGEAVLFGRKTVPEADPQTGRRRWRTLPGDWRLEREFPPRLGARTKDGAPSNEAGANTCYCGALLRIKLLHGEVLQPWQIFKALHNAIQKRGYDPEVPWKNRGRGEQREDEEAGATLARANAAEQEISQLLPDDPERQMPCYLEAHEMGLWHPGDPDDTTALRQTHHAKPAKNRVFLRETVERELRALLNAAARQLPTLRGKTEFVLFGPTGVPYASFKPTARVVYKAATGRDLIEGKQTDWQGVLGQKIPTFDNRAVESCALIPRFHAAKAAPRFRTKPDGSPYPAEDSLLPAEVSFLMKLKHFRFALTGGQPGRFSAPIIRDLFEQKRADVVQKAKVELFSLTKTALKKWIERAGGVDFLANQTEIEAPRTTGRSRFSKPALRIVRDLVLSGQSPVEIHTRALAQLGGNVDPKAGLVPEDIDFLLHINSSGGGPATWENFYLPDESLSFVDSSVGSRERKILTLIGRQNNPIVRHRLETFWRLLKGLEARHGKPDRVALEFVREDFMGEKAKIELAKFQKQRRDARAEARKEVGRGKDMLRYQLLKDQGGDCLYCGQPLGLDELANTHLDHIVPDALGGPGAYWNFLVCCGTCNDAKRNRTPWQWFQEDHRAGWDAYAARVRARTFQLKPKKVRLLTQPDAPDLVQRYQSLAETAWIARLAQTLVCLQFGWPRNFSDGPRRVVVLPGGLTARVRRKYKLNALLGQEIAALEAKLSEEGDAKTEFEIDKKCRADKRHHALDAMVLSFLPQWTADPTKAVRVKLPDREGVHREFFEHYLTHVVPTNLCIEKPALEESAYGRRLMTQARAMFATKRFELKDLGLTGINPVFKLETLRKDAARILDTAIKSAVQEFIKMHKPDGAAWLTFCDSFRQPGRADGPRVKRVRLIVPERLDSFKDMSKGDRRPALKKGSRHRGYFLYSDMKGVVRVRPVYVFQSPSTVRKALLATQGTEVGEVLEFFQSGCSVTLTQPVEDPKTPLQPGEYLLNSIEEDRRAQLTSAAGVKSRTGLQKLISSGFSRTRLS

SEQ ID NO: 9040 - protein, 797 aa, synthetic construct
  REGION 1..797: note = Synthetic
MALAPRKLVEKELLHLLEKAACLFPKMKGKEKYVLYGPSEKQYASFCDPKEYSRYRGRVWEWQGLLGQKVPRFDNRIIAKCVLIPRLNVCKASDILNQEVTFLMSLKNMRYFDGDRREKSLSSEEMKELFESFSKTKKITQSKWGKYIQENLSGTVHPNQKEVSGSKAGGRSRFSRPALRILKDLLLSGKSPHVIYEEMVQQCTCLDIRKGLIKEDYEFLKKMPSEWENFHIPDQRMDDLHILKDARLRNKRIAEIINEINNPVVRHRLSFFLNRLEWLVDRYGQPDKVIIELVRDTKTGFMGKKNRENYQKIQNENLKKRKDALDEVSRLNLSGQNAIVKMLLFKEQNGIDFYTGQMLQETEIENYEIDHIYPKARGGSDVFFNKILTTRTKNQEKDDKTPYEWLHNSDFWEAFLSLVKENNLHKKKKNLLTSENADELNEKYADLAATAYVAKLCQRIVSLYLGWPHLVPGSERKILVSNGGYTAKIRRRYRLDQLLHPDLSPEEIAALAREGKIEEKNRDNPLHHSLDALVISMWPYFSESDLSTMPSWFSPCFCKEALDKVIALPVAYQKPELAKTIFGKRKRKNGTYCFVARQNKGTSITEYYTLEGAKKYVDKIFDQKIQNDFKKKLESDPPPTEEEWKSFIQSYSVNGSKLKKISLVASTDIKEGSASEYAEIGKVKGQYYKNLKEYKGQIVYKDQKGKWRVAPVYVFESVFQKKMQYKREYGTVYFFKSQQRIVLKHNTVNCSAGVYILKSIKTNGQVQLALPDESKAIRESLHRLMEEGEMRLFQPEQ

SEQ ID NO: 9041 - protein, 847 aa, synthetic construct
  REGION 1..847: note = Synthetic
MSEKLVYAFDLGKASLGICVRQGHDIKEVQSLSIDPEYADISEIRKRRRAKKLREFHKRREEYLRQVWINAGLTPLDSDDKRLKREFDKSKKTVYTSCLLRILLLQNKPLEEWQIFKALWSAIQRRGYDENLPWMSNSKRAKTKDDEENSKYLSEYNRLLDEYIPNKAYHYPCYLDASLMRLWDCSNPEVIKLKSSIETQAARGAGRVAPRKLVEKELFELFENAKKQIPSLNNIDTMEFLYGEGKQAYASYVNPEFRRFMGKEEFDWNGVLSQKIPRFDNRIISKCCLLPLRNVCKADSIENIEANILLRLKNFRYMNIYNEKCSLTADQISKIFNDNLEYIHKNAKLNKTQINKFFKNENIEFHENTFSKDKDFKEFTVNTSGRSRFCRPALKVIKELILSGKDPHAFDTTKFVQNWDETKPEKGITKSELDLMLSRLGDSWQNIHIGDDRNELLQRAIEDREKEIARIIGSVTNPIVRNRLQWFFNELKYLDSKYGKPDEVIFEFIRDGKETSLLGQQRIKRYIKKISENEKNNELIKQKLKDAGLSEKNAFEKLKLLEMQGGKCIYTGKNISINDLNSCQIDHIVPVSQGGDDSLSNKVLCIAQANQEKRELTPYQWLSSNEERWGDFCYRVLELSSSLGKRKTELLLSPNAKDLIESYRGLAETSYISKLVQKITSVYFGWGMQTENDKRHIFVSNGSETAKIRSKYRLNEFLYPEGTDAKDIKNRSNPKHHGLDAICISYSREYKAHKDEKGNYKFYIEGFEREKVKQALDNMIPYPVKRYKADLNPLETIYGKREKNQKYYLVSRKNFTDIEYKESAIKKIFDEDIRNNLLSQLEKKLSK

SEQ ID NO: 9042 - protein, 1015 aa, synthetic construct
  REGION 1..1015: note = Synthetic
MKKFFAFDIGKKGLGYCCREGSKIHCAGSLTIEPDHSSVEDIRNNRKAIKTRIFHKAREEYFNKLWHDEAGLEILDKDDERFKIEFSKQDDERIYNSTLLRIALLQNRELEKWQIYKALHNAFQRRGYDSELPWKNSGTKADEENEKLAKNYTQKNGQKLIKKEKFQYPCYYDALALGMWKERNPSDLQRIVSKNPQKIRTGRRVAPRKLVIKELTDLWTAAQKQIPELQKISADKFLYGEYREPYASYTNPDWHKNMGKEKDWQGVLGQKIPRFNNRIISKCKLLPKRNVCSADTIENIVFTLLYQLKNFRYTNSNGEVGCRLAPIEIKEIYDNNIQNWMKNLYDNKKNNKSHTFTVSKTEIEKVIGKGQIYTTKNEKFKSFQANTSGRSSFCRRALQIMNEIILTGTDPKDVNISKFVDKSTTNNPITEDEIKEMLTKVGDWNELYIPYNSTRMAEFAQNPDIQSDLMIGSITNPIIRNRLQIFKNLLNDMIKKYGKPDEVIFEFVKDGKDNSLFGAEKAKATEQMMRINEKKNEEIRNNLSDDYSAINFLKYKLAEMQDWTCIYSGRKIEITDFDACEIDHIFPRTDDTNDALYNKVICYKEEIADKHGRTPYEWMNNNTARWQEYIMRVKSLSQKSGKTKTALLTLSPTQSEKFLEKRKALNETTQIAKIVQSVTASVLEWDLQVKDKNRHIFISDGSSTHKIRQQYKLDRLLDDNAKKNRENGKHRALDAICISYSKDFQYNTEQHKYEIENIDIPHIEDVINHVVPYPYTNDKPLKSALAPAGTIYGKKVKNGKTYITKRIALLDIKKDSKSINKISDNDIKSDLLNKSGKNLSDDNWVKILSKYTHPKRGTKVKKVIVLEEFKGQITFDSNGRERLGEYCDFGNKGTKGQFKHSKQHRGQILYFNEKGKIKVMPVYANKKVQDVKDELINMGCKLYHGGEMFYSGCLIEIPNDFKAGGNIQPKGIYKVSTITTAGLVKIENNSGNIVHTNSTHITEADFRKFIKRSNS

SEQ ID NO: 9043 - protein, 1008 aa, synthetic construct
  REGION 1..1008: note = Synthetic
MKKVFAFDMGKASIGYCVREDFEIKDIGSIIIDKDHASVVDNRARRRTYRTIQAHRARELWFKNLWISRGLKPLEETDEKFKKEFAQKNDNTIYNSTLLRIALIQGRKLEEWQIYKALHNAIQRRGYDNNIAWATSDDDKENEEAIKKYSCIDGIELILSDEYKYPCYYDALLLGLWSENNPNELKRCIGLNPEKVRKAGRVTPRELVVKELSKLWEEAKKQIPQIQDITIDEFLYGDYREAYASYHNPEWIQYRGTEKDWQGVLGQKIPRFNNRVIAKCRLLPKRNVCSADSIEHISLVLLMQLKNIRFIDDTTLEQRRLAPYEIKEIYDKKVVEWAKNLTDLRKGIKSTATFSIPKTDIEKVVGQKFKKNEVETLKANISGRSSFCRRACQIMIDIITSGLHPHEIDVSKYADKEGTKNGITKEEIQTMLSKIGDWNNLFIGDNRDELAQESKNAEIKSDILIGNITNPVVRNRLQIFKNLLNSLIYDNGKPDEVIFEFVRDGADNSLFGSIKANDTAKYMKSQEKENEQLIKELEEYNCNPKQYFLMHKLAKMQDFKCIYSGDRISPAEYPLCEIDHIYPRSIGGNDALYNKVVCYKKENQDKAGRTPYEWLYTNKSRWEEFNTRITNLRPKLGKKKADLLVLPPDKCAKLIDSYNGLAETAQVAKVASAITHYICGWGMQTKGDERHVYVENGSTTAKIRRTYSLNSLLGDDEKKNRTNPKHHALDAICISFAREYKLDEETRRYSIKGFNRPQVEEKIMELMPYPYTHRKPLKSELRPKETYYGKRMFNGNYCLTERIEIIEIKKDKKKIEKILDPIIRENLISKLNDNLSEDEWLKMLSTYIHPTKKTKIKKVRTKIDCNAQLTNDLNGRERFDSFVDFGTKGTKGQFKRSKGHKGQILYYDAKGNIKVMPVYANKSTKEVRENLMEMGCKLYNGGEMFSSGCLIYIPNNFKAGSLFYEKGKYKLNSIWSNGPVEIEDNNGKKILSSTKYLTEAQFRKIVDF

SEQ ID NO: 9044 - protein, 1012 aa, synthetic construct
  REGION 1..1012: note = Synthetic
MKKIFAFDMGKASIGYCVRENNDIKDLGSLIIEKDHSSVADNRTRRRAYRTLEAHKAREDWFNNLWEKAELKFANDEQLKREFAAEGDETIYNSTLLRIALIQGRKLEEWQIYKALHNAIQRRGYDSKIAWANSADGKENEEAIKIYTQKNGIELIKSEEYKYPCYYDALLLGLWNENKPNELKRSIGLMPEKVRRNGRVAPRKLVIKELTKLWEEAKKQLATLEKISVEEFLYGDYREAYASFKNPDWMQYRGTKKDWQGVLGQKIPRFDNRIIAKCKLLPKRNVCKADTIESITLTLLMQLKNFRYTNAFTFENDLKLAPFEIKQIYDNKKIEWDESLERYKNKELKNPSFTITKNDIEKVIGKKVIKEKVEKFTANISGRSSFCRRACQIMIDILINGYLNPIEELDYNKYIDKEGTPNPITKEEIHEMLSKIGKWNELHIPDNRYELAEISQTADKESDLLIGNITNPIVRNRLQIFKNLLNELIARNGKPDEVIFEFVRDGADNSLFGSIKANNTSKYMKEQEKENEQIKKDLEDKNAYSETNFLKYKLAKAQDFKCIYCGEKIGISDFDSCDIDHIFPRSRGGNDSLYNKVICHKKENQDDKKDKTPYEWLNSDKQKWAEYTTRVINLKTKLGKKKAELLTLPADKCTKLIESYNGLAETAQVARVASAITHFICGWGMQTSGQERHVFVENGSTTSKIRKIYKLNAILGNDEKKNRDNPKHHALDAICISYAMDYHYDKEKKKYNVEGLKHDYVEEKINELMPFPYTHKKPLKNKIRPDVFIYGKRAIDNETCLITRKVELTSIKQNKNSINSIMDTIIKEDLLQKLEQNISQDNWVNLLKQYIHPQKKTKVKNVRLIYSIGKLETDNNGHDRIGEYADFADFKNKNIKGQYKVSKQHKGQILYYDSKGSIKVMPVFANKSTKEVKEQLQNMGCKLYQGGEMFYSGCLVEIIKNFKASNTTYPKGIYKLHTIKQSGTVIIENNVGKEISTSAKNLTEAEFRKKKI

SEQ ID NO: 9045 - protein, 1003 aa, synthetic construct
  REGION 1..1003: note = Synthetic
MEKVFAFDMGKASIGYCVRSGNEILDLGSVIIDKDHSAVVDNRNRRKTHKTIEAHREREKWFNNFWIEHGLEIADENLMKKEFGSVNDSKIYNSTVLRCVLIQGKQLEVWQIYKALHSAIQRRGYDSNIAWANTEDEKENEEAIKKYTVKDGKELIISEEYKYPCFYDAILLGLWSEREPNIFNRSIGLSPEKIRTAGRVAPRELVIKELAKLWEEAKKQLPQLDKISVDEFLYGNYRKAYASYSEPEWIQFRGTKTDWQGVLGQKIPRFDNRVISKCKLLPKRNVCSADTIENISLTLLMQLKNFRYTNAYTFESGIRLSPDEIRQIYENKLPEWLESLNKYRHKYLKNPSFTITKTDIEKVIGKTVIKDKMEKFTANISGRSSFCRRACQIMIDIIISGYHASEIDSEKYADKGTNKNPITKEEIEKMLSKIGDWNNLFISDNRYEAQEIAESGNKESDLLIGNITNPVVRNRLQIFKNVLNNLIAENGKPDEVIFEFVRDGADNSLFGSIKANDNLKYQKQQEKENEQIKKDLGNDYSETNFLKYKLALSQDFKCIYSGERIGTGDFDNCQIDHIFPRTAGGNDALYNKVICYNKENQDKAGRTPYEWLYNDKQRWAEYSTRVMNLKSKLGKNKTNLLLLPPDKCIELIKSRNGLAETAQVARVASAITHFICGWGMQTKDNERHVFVENGSTTAKIRKSYKLNSILGDDEKKNRSNPKHHALDAICISYARKFKFDEEKHKYYVEGLQRDYVEQKINELMPFPYTHKKPLKSNTSPLETIYGKRIIDGKAYITSRVSIETIKQDLKSVKNIIDVVIKNDLTNKIENKVSSEEWLNMLKHYVHPKKKTFVKKVLVIVSEGTLEMDANARERIGEFSDFGTKGTKGQFKHSKAHKGQILYYDNKGSIRVMPIYANKSTQEVKDKLVNMGCRLYRGGEMFYSGCLVEIPNDFKAGDKTFTKGIYKLRTITEAGQSKLENNIGQEILTSAKNLTFAEFYKKKD

SEQ ID NO: 9046 - protein, 1007 aa, synthetic construct
  REGION 1..1007: note = Synthetic
MNKIFAFDMGKASIGFCAREDNEIKSLGSVIIDVNHADSADNRARYRVHKTIEAHRAREKWFDELWLENGLPEFSKKDDFFKKEFASACDETIYNSTLLRCALIQGRKLETWQIYKALSSAIQRRGYDSSIAWADSEDDEENRKAAEKYTQKDGIELIISDEYKYPCFYDALLLGLWEENNPYEFKRSIGLNPEKVRTAGRTAPRELVIKELTKLWDEAKKQLPQLKKVSAEEFLYGNYREAYGSYKNPEWMHLRGTKADWQGVLGQKIPRFDNRIISKCRLMPKRNVCSADTIENISLVLLMQLKNFRYTNAFSFETGLRLSPVEIKQIYENKLSGWIESLNKYRKGELKKPSFTITKKDIEDVIGKKTIKDNMEKFSADISGRSSFCRRACRIMIDIITSGIEPLELDIEKYIDKEGSKNPVTKEEIKTMLEKTGAWNELHISDNRYEQKELAETADKESDLLIGSITNPVVRNRLQIFKNLLADLIKENGAPDKVIFEFARDSAENSMFGKIKTESYINTVKNNEKENELIKKALEDSQSYSETNFLKYKLAKIQDFRCIYSGEKIGISDFDACQIDHIFPRTAGGNDALYNKVICFNKENQDKAGRTPYEWLYNNKERWSEFTNRVQSLKKSLGKKKAELLTLPPDKCAEKIKSYNGLAETAQIARIASAITHYMCGWGMQTKGDNRHVFVENGSITAKIRKSYKLNSILGDDEKKNRSNPKHHAVDAVCISYAMDYKFNEQTHKYSAEGLKRDYVQQKIDEFMPFPYTHKKPLKKAVQPLETIYGKRKIGDEYFITSRTDITDLKQDIKAVRNIIDTVIKEDLTAKLESNMPSADWKNMLADYIHPKKKTKVKKVLITVSEGSLDIDENGRERIGEYSDFGTKGTNGQFKHSKAHRGQILYFDNKGAVKVQPVYSNKSLKEVREELQDKNCRLYKGGEMFYSGCLVQIPNDFKAAEKTYSKGIYKLRTVRLDGVIKLENNIGQEINTSAKNLAEAGFYKKKD

SEQ ID NO: 9047 - protein, 1007 aa, synthetic construct
  REGION 1..1007: note = Synthetic
MARIFAFDMGKASIGYCVREDNEIKDLGSVIIEKDHSAVEDNRNRRRTAKTLEAHRKREEWFARLWNNAGLNVLDCTDEKFKKEFASKDEDTIYNSTILRCALIQGKTLEEWQIYKALHNAIQRRGYDTELAWANSTDDKENEEAVKKYSCKDDLELINSDDYKYPCFYDALLLGLWNEQIPLEFKRIIGLTPEKVRTSGRVAPRTLVIKELTKLWEEAKKQLPQLEKISVEEFLYGEYREAYGSYYNPEWIQYRGTKRDWQGVLGQKIPRFDNRVIAKCKLLPKRNVCSADTIENISFTLLMQLKNFRYTNAFTSDSDQRLAPYDIKQIYENKLPEWVQKLTDYRKGIIKNPSFTVSKTDIENVIGKKTIKDKMESFKANISGRSSFCRRAMQIMIDILINCIEPSKVDVEKYIDKDGTPNGITKEEIQSLLDKLGDWNSLCIPDNRYEMEKISQNADKESDILIGNITNPVVRNRLQIFKNLFIELMLDGKPDEVIFEFVRDGADNSLFGSVKANNTAKYMKDQEKINEQIKQELVDANAYSETNFLKWKLAKLQDCRCIYSGDRIGIADIDNCQIDHIYPRTLGGNDALYNKVLCYNKENQDKAGRTPYEWLYNDKERWAEYTTRVLNMKGKLGRKKAQLLVLPTDKCEKLIDSYNGLAETAQVAKVASGITHFLCSWGMQTEGSTRHVFVENGAMTAKIRNIYRLNAILGDDAKKNRSNPKHHALDAICISYARNLKLDKDRHKYYVEGLNRPYIEQKINELMPFPYTHKKPLKANTRPLETIYGKRIIDDKAYITSRVTLEDMKQDIKAIKNIVDTVIKDDLTSKLEEKLSAQDWKTMLQNYVHPKKKTKVKKVLILVSEGQLEIDLNGRERIGEYSDFGTKGTKGQFKHSKGHKGQILYYDKKGSIRVMPIFSNKSTKEVKDNLIEMGCKLYNGGEVFYSGCLVEIPNDYKAGAMTYPKGIYKLRTIIVKAGVIHLENNIGQEILTSAKNLSIAGFYKLKN

SEQ ID NO: 9048 - protein, 1007 aa, synthetic construct
  REGION 1..1007: note = Synthetic
MKKVFAFDMGKASIGYCVREDNDIKELGSLIIDINHSSVKENRDRRRVMKTIEAHREREKWFNNLWESSGLNALEKHDKRFTREFAAKKDTTAYNSAVLRCKLILGERLEEWQIYKALHSAIQRRGYDNNLAWANSADDKENEKAVKTYSFDGDKELIKNDIYKYPCFYDALLLGLWNEQTPDIFNRSIELNPEKIRKAGRVAPRCLVEKELIKLWEEAKKQLPVLQKISAEEFLYGEYREAYGSYHNPEWIQYRGTKRDWQGVLGQKIPRFDNRVIAKCRLLPKRNVCSADTIENISFTLLMQLKNFRYTNSFTFESNQMLAPYEIKQIYENKLPEWIEKLNIKRKDKTKNPSFTISKTDIESVIGKKTIKEKTDSLKANISGRSSFCRRAMQLMIDMLINCINPSEIDIEKYIDKEGTNNGITKEEIQTMLSRLGDWNSICIPDNRYEMKKISQNADKESDILIGNITNPVVRNRLQIFKNLLNELIESEGKPDEVIFEFVRDGADNSLFGSMKANNTAKYMKEQEKINEQIKNELTIAGAYSETNFIKWKLAKLQDFRCIYSGEKIGINDIDNCQIDHIFPRTYEGCDSLYNKVICYNKENQDKGGKTPYEWLYTDKDRWAEYTTRVLNMKGKLGKKKAQLLLLPPEKCEKLIDHYNALSETAQVAKVASAITHFICGWGMQTKDSERHVFVENGSMTAKIRNIYRLNSILGDDKKKNRENPKHHALDAICISYARNLKLDEQKHKYYVDGLSKPYIEQKISELMPFPYTHKKILKANTRPLETIYGKRIIEGKAYITSKVGIETIKQDLKSIKNIVDKAVKEDLTKKFELKMSADEWQNMLKNYTHPKKKTQVRRFLTIVSEGILEKDINGRERIGEFADFGTKGTMGQFKHSKAHKGQILYYDTKNNVKVMPIYANKSTKEVKEKLIDMGCKLYNGGEVFYSGCLINVPNEFNAGSKKHPKGIYKLRTIMQDGKVKIENNIGMEILTSAKNLATASFIKKKD

SEQ ID NO: 9049 - protein, 1013 aa, synthetic construct
  REGION 1..1013: note = Synthetic
VKKVFAFDMGKASIGYCVREDNDIKELGSLIIDINHSSVKENRDRRRAMKTIEAHREREKWFNNLWIENGLKILPANDMRFTREFAAKNDTTAYNSAVLRCKLILGERLEEWQIYKALHSAIQRRGYDNNLAWANSTDDKENEKAVKTYSFDGDKELIKNEIYRYPCFYDALLQGLWTEENPKHFNEFLGLSPQKIRKNDRVAPRCLVEKELIKLWEEAKKQLPVLQKISAEEFLYGEYREAYGSYHNPEWIQFRGTKKDWQGVLGQKIPRFDNRVIAKCRLLPKRNVCSADTIENISFTLLTQLKNFRYTNSFTFENNQMLAPYEIKQIYENKLPEWIEKLNIKRKDKTKNPSFTISKTDIESVIGKKTIKEKTDSLKANISGRSSFCRRSCQIMIDIITSGKKPLEIDVEKYIDKEGTNNGITKEEIQTMLSRLGDWNSICIPDNRYEIKKISQNADKESDILIGNITNPVVRNRLQIFKNLLNELIEREGKPDEVIFEFVRDGADNSLFGSMKANNTAKYMKEQEKINEQIKNELTVAGAYSETNFIKWKLAKIQDYRCIYSGERIGITDIDNCQIDHIFPRTYEGCDSLYNKVICYNKENQDKGGKTPYEWLYTDKDRWAEYMTRVLNMKGKLGKKKAQLLLLPPEKCEKLIDHYNALAETAQVAKVASAITHFICGWGMQTKDSERHVFVENGSMTAKIRNIYRLNSILGDDKKKNRENPKHHALDAICISYARNLKLDEQKHKYYVDGLSKPYIEQKISELMPFPYTHKKILKANTRPLETIYGKRIIEGKAYITSKVGIETIKQDLKSIKNIVDKAVKEDLTQKFELKMSADEWQNMLKNYIHPKKKTQVRRLLTIVSEGILEKDINGRERIGEFADFGTKGTMGQFKHSQSHKRQIFYYDKNGNVNVMPVFANISKEDEKSLKKKLIDMGCKLYKGGEVFYSGCMINIPNEFNGGKNKYPKGIYKINTIKKDKVIELTNSTGNKILTSAKNLTDVGFYKVKNKKF

SEQ ID NO: 9050 - protein, 1020 aa, synthetic construct; identical to SEQ ID NO: 6363
  REGION 1..1020: note = Synthetic

SEQ ID NO: 9051 - protein, 1023 aa, synthetic construct
  REGION 1..1023: note = Synthetic
MNKKVFAFDLGKASVGYCVREDFNIKTVGSIIIDKDHAEISTNRDRKRAKKTIEAHKAREQFFKKLWQNAGLETLDKEDERFKKEFGNKKDKNIYTSCLLRIALLQNKKLEQWQIYKALFNAFQRRGYDAINLAWANTKTDDDKKNAEYMAKYAKENNVELINNDDFKFPCYYDAKRLGLWSEENPSELKTTIPLTGSKKVRTNGLVAPRELVEKELKQLWLNAQKQLPQLQNIDAEYFLYGDYRQAYGSYVVKEFRKFRGTKNDWQGVLGQKIPRFDNRIIAKCKLLPKRNVCKANTLENVSLVLLMKLKNLRLTDNIGEKFLLSPIDIKKIYENWLIKAKIDTNEEKLDTTITKKEIETVLNRKIKDKIDPMKANISGRSSFCRRACKIMTKIILSCELYPQNVDITEFVDKPNTQNPITIEEINTMISKIGDWNNLYIPDNRDEMAENSSDNREQTDTLIGNITNPIVRNRLQIFRDLILNLKQEYGTPNEVIFEFVRDGADNSLFGAKKANDTLKVMKENEKDNEQIVSELKDANALSSENILKLKLLKKQGLKCIYSGKSIGISDFDACEVDHIYPRSMGGNDALYNKVLCYSVENQKKAGRTPYEWLHNDEKTWFDFVNRLEAIKDTLGKKKYELLTSKPEDCKKLIDSYNGLAETAQIARVAQQFTATIFGWGLQVEGENRHIFVNNGSSTASIRRTYKLNKLLGDDVKKNRDNDKHHALDAICISFSRDYKYNKEKKVDEIEGLNPEIIKEAINNLMPYPYANDKTFKGNIKPLESIYGKRVKNGNTYLTKRADITSLEPKEKKINNILDDDIRKDLLNHINNKPTNQEWNELLANYTHPKKKTHVKKVLMIEAKGQIELDKNERERMGEYVDFGTKSVKNQFKHSKGHKGQILYFDPKNAVKVMPIYANKKTQDVKDKLIDMGCKLYNKGEMFYSGCLVEIPEDFEANVYSLIVNENGKEKKVSSKSIVSKGIFKLRTIMSNGGIRIENNSGIEILTSINNLVYLHFKKYKNEK

SEQ ID NO: 9052 - protein, 919 aa, synthetic construct
  REGION 1..919: note = Synthetic
LQNKKLEQWQIYKALFNAFQRRGYDAINLAWANAKTDDDKKNAEYMAKYTKENNVELINNDDFKFPCYYDAKRLGLWSEENPSELKTTIPLTGSKKVRTNGLVAPRELVEKELKQLWLNAQKQLPQLQNIDAEYFLYGDYRQAYGSYVVKEFRKFRGTKNDWQGVLGQKIPRFDNRIIAKCKLLPKRNVCKANTLENVSLVLLMKLKNLRLTDNIGEKFLLSPIDIKKIYENWLIKAKIDTNEEKLDTTITKKEIETVLNRKIKDKIDPMKANISGRSSFCRRACKIMTKIILSCELYPQNVDITEFVDKPNTQNPITIKEINTMISKIGDWNNLYIPDNRDEMAENSSDNREQTDTLIGNITNPIVRNRLQIFRDLILNLKQEYGTPNEVIFEFVRDGADNSLFGAKKANDTLKVMKENEKDNEQIVSELKDANALSSENILKLKLLKKQGLKCIYSGKSIGISDFDACEVDHIYPRSMGGNDALYNKVLCYSMENQKKAGRTPYEWLHKDEKTWFDFVNRLEAIKDTLGKKKYELLTSKPEDCKKLIDSYNGLAETAQIARVAQQFTATIFGWGLQVEGENRHIFVNNGSSTASIRRTYKLNKLLGDDVKKNRDNDKHHALDAICISFSRDYKYNKEKNVDEIEGLNPEIIKEAINNLMPYPYANDKTFKGNIKPLESIYGKRVKNGNTYLTKRADITSLEPKEKKINNILDDDIRKDLLNHINNKPTNQEWNELLANYTHPKKKTHVKKVLMIEAKGQIELDKNERERMGEYVDFGTKSVKNQFKHSKGHKGQILYFDPKNAVKVMPIYANKKTQDVKDKLIDMGCKLYNKGEMFYSGCLVEIPEDFEANVYSLIVDENGKEKKVSSKSIVSKGIFKLRTIKSNGGILIENNSGIEILTSINNLVYLHFRKYKNEK

SEQ ID NO: 9053 - protein, 1023 aa, synthetic construct
  REGION 1..1023: note = Synthetic
MSKKVFAFDLGKASVGYCVREGFDIRKVGSIIIEKDHAEITTNRDRRRVKKTLEAHKAREQFFKKFWQNAGLETLDKEDERLKKEFGNKKDKNIYTSCLLRIALLQNKKLEQWQIYKALFNAFQRRGYDAINLAWANAKTDDDKKNAEYMAKYTKENNVELINNDDFKFPCYYDAKRLGLWSEENPSELKTTIPLTGSKKVRTNGLVAPRELVEKELKQLWLNAQKQLPQLQNIDAEYFLYGDYRQAYGSYVVKEFRKFRGTKNDWQGVLGQKIPRFDNRIIAKCKLLPKRNVCKANTLENVSLVLLMKLKNLRLTDNMGEKFLLSPIDIKKIYENWLIKAKIDTNEERLDTTITKKEIETVLNRKIKDKIDPMKANISGRSSFCRRACKIMTKIILSCELYPQNVDITEFVDKPNTQNPITIKEINTMISKIGDWNNLYIPDNRDEMAENSSDNREQTDTLIGNITNPIVRNRLQIFRDLILNLKQEYGTPNEVIFEFVRDGADNSLFGAKKANDTLKVMKENEKDNEQIVSELKDANALSSENILKLKLLKKQGLKCIYSGKSIAISNFDACEIDHIYPRSMGGNDALYNKVLCYSMENQKKAGRTPYEWLHKDEKTWFDFVNRLEAIKDTLGKKKYELLTSKPEDCKILIDSYNGLAETAQIARIAQQITALVFNWGLQVEGENRHIFVNNGSSTASIRRTYKLNKLLGDDVKKNRDNDKHHALDAICISFSRDYKYNKEKNVDEIEGLNPEIIKEAINNLMPYPYANDKTFKGNIKPLESIYGKRVKNGNTYLTKRADITSLEPKEKKINNILDDDIRKDLLNHINNKPTNQEWNELLANYTHPKKKTHVKKVLMIEAKGQIELDKNERERMGEYVDFGTKSVKNQFKHSKGHKGQILYFDPKNAVKVMPIYANKKTQDVKDKLIDMGCKLYNKGEMFYSGCLVEIPEDFEANVYSLIVDENGKEKKVSSKSIVSKGIFKLRTIKSNGGILIENNSGIEILTSINNLVYLHFRKYKNEK

SEQ ID NO: 9054 - protein, 1022 aa, synthetic construct; identical to SEQ ID NO: 6362
  REGION 1..1022: note = Synthetic

SEQ ID NO: 9055 - protein, 1022 aa, synthetic construct
  REGION 1..1022: note = Synthetic
MSKKVFAFDLGKASVGYCVREGFDIRKVGSIIIEKDHAEITTNRDRRRVKKTLEAHKAREQFFKKLWQNAGLETLDKEDERFKKEFGNKKDKNIYTSCLLRIALLQNKKLEQWQIYKALFNAFQRRGYDANLAWANAKTDDDKKNAEYMAKYTKENNVELINNDDFKFPCYYDAKRLGLWSEENPSELKTTIPLTGSKKVRTNGLVAPRELVEKELKQLWLNAQKQLPQLQNIDAEYFLYGDYRQAYGSYVVKEFRKFRGTKNDWQGVLGQKIPRFDNRIIAKCKLLPKRNVCKANTLENVSLVLLMKLKNLRLTDNMGEKFLLSPIDIKKIYENWLIKAKIDTNEEKLDTTITKKEIETVLNRKIKDKINPMKANISGRSSFCRRACKIMTKIILSCELYPQNVDITEFVDKPNTQNPITIEEINTMISKIGDWNNLYIPDNRDEMAENSSDNREQTDTLIGNITNPIVRNRLQIFRDLILNLKQEYGTPNEVIFEFIRDGADNSLFGAKKANDTLKVMKENEKDNEQIVSELKDANALSSENILKLKLLKKQGLKCIYSGKSIAISNFDACEIDHIYPRSMGGNDALYNKVLCYSMENQKKAGRTPYEWLHKDEKTWFDFVNRLETIKDTLGKKKYELLTSKPEDCKILIDSYNGLAETAQIARIAQQITALVFNWGLQVEGENRHIFVNNGSSTASIRRTYKLNKLLGDDVKKNRDNDKHHALDAICISFSRDYKYNKEKKVDEIEGLNPEIIKEAINNLMPYPYANDKTFKGNIKPLESIYGKRVKNGNTYLTKRADITSLEPKEKKINNILDDDIRKDLLNHINNKPTNQEWNELLANYTHPKKKTHVKKVLMIEAKGQIELDKNERERMGEYVDFGTKSVKNQFKHSKGHKGQILYFDPKNAVKVMPIYANKKTQDVKDKLIDMGCKLYNKGEMFYSGCLVEIPEDFEANVYSLIVDENGKEKKVSSKSIVSKGIFKLRTIMSNGGILIENNSGIEILTSINNLLYLHFRKYKNEK

SEQ ID NO: 9056 - protein, 1004 aa, synthetic construct; identical to SEQ ID NO: 6365
  REGION 1..1004: note = Synthetic

SEQ ID NO: 9057 - protein, 1036 aa, synthetic construct; identical to SEQ ID NO: 6360
  REGION 1..1036: note = Synthetic

SEQ ID NO: 9058 - protein, 1036 aa, synthetic construct
  REGION 1..1036: note = Synthetic
MGKKVFAFDMGKASIGYCAREDFEIKEANSIIIDKDHSDISSIRDRRRVKKTLNAHKARERFLVNLWKSCNLIPLDTKDDKFKKEFANKKDSTIYTSCLLRIALLQNKKLEQWQIFKALYNAIQRRGYDANLAWKSAQTNDDKENIELTQKYTQENGIELIKNEKYKYPCYYDAKRLGLWDENFPNRFNQAINLDNVIKVRTTTYVAPRQLVEKELKQLWINAQIQIPELNKYSVEEFLYGEYKEAYGSYVNPEFKKYMGTAHDWQGVLGQKIPRFDNRIIAKCKLLPKRNVCKANTIENVTFVLLMKLKNLRITNNLGEKIILSPEEIKHIYENWLSKVEQNVIKMQEKCKKENKTPDKEDKKLDTTITKKEIENVINQVISDKIEPMKANISGRSSFCKRACQIMNKFILGGYLYPQEMDITEFIDSENSPNGITKQEIQVMLSRIGDWNNLYIPDNRGENINDSEKIRTNTDLIIGSITNPVIRNRLQIFRDLLLSLEKDYGKPDEVIFEFVREGADNSLFGKAKAQAAETNMKAMEKQNQQLVKELKNYDAYSSINFEKLKLLKMQCGQCAYSGQKIGISDFDKCEIDHIYPRTMGGNDALYNKVLCYRVENQKKQGRIPYEWLSSDKEKWANYVFRLNEIKKSLGKKKFELLTSKPEDCEKLIDSYNGLAETAHIAKVAQQIAAVCFSWGLQIEGEKRHIYVNNGSSTHAIRHRYGLNSLLGNDIKKNRDNDKHHALDAICISFSRDFKYDEESKKDIIKGFTREMVKKVIDEIMPVPYTNKKPFKGNTRPLETIYGLRAYNGKSYITQRVPLESIEPKEKKVRTIIDEVIKNDLLEKLNQKIDSKEWISMLQNYIHPKKKTIVKKVMIVVSEGSIEKDSNGVERIGEFCDFGTKGTKHQFKHSKGHKGQILYFDEKGLVKVMPIYSNIRTQDIKDKLMTMGCKLYNKGEIFYSGCLVEIEKPFVATVYYKETDTDGKEKTISVKQEVPDGIFKIRTIMGDGKIKLENNCGLEILSSAKVLVPLNMKKYKN

SEQ ID NO: 9059 - protein, 1036 aa, synthetic construct
  REGION 1..1036: note = Synthetic
MGKKVFAFDMGKASIGYCAREDFEIKEANSIIIDKDHSDISSIRDRRRVKKTIIAHKAREQFFVNLWKSCNLTPIDTKDDNFKKEFANKKDSTIYTSCLLRIALLQNKKLEQWQIFKALYNAIQRRGYDANLAWKSAQTNDDKENIELTQKYTQENGIELIKNEKYKYPCYYDAKRLGLWDENFPNRFNQAINLDNVIKVRTTTYVAPRQLVEKELKQLWINAQIQIPELNKYSVEEFLYGEYKEAYGSYVNPEFKKYMGTAHDWQGVLGQKIPRFDNRIIAKCKLLPKRNVCKANTIENVTFVLLMKLKNLRITNNLGEKIILSPEEIKHIYENWLSKVEQNVIKMQEKCKKENKTPDKEDKKLDTTITKKEIENVINQVISDKIEPMKANISGRSSFCKRACQIMNKFILGGYLYPQEMDITEFIDSENSPNGITKQEIQVMLSRIGDWNNLYIPDNRGENINDSEKIRTNTDLIIGSITNPVIRNRLQIFRDLLLSLEKDYGKPDEVIFEFVREGADNSLFGKAKAQAAETNMKAMEKQNQQLVKELKNYDAYSSINFEKLKLLKMQCGQCAYSGQKIGISDFDKCEIDHIYPRTMGGNDALYNKVLCYRVENQKKQGRIPYEWLSSDKEKWANYVFRLNEIKKSLGKKKFELLTSKPEDCEKLIDSYNGLAETAHIAKVAQQIAAVCFSWGLQIEGEKRHIYVNNGSSTHAIRHRYGLNSLLGNDIKKNRDNDKHHALDAICISFSRDFKYDEESKKDIIKGFTREMVKKVIDEIMPVPYTNKKPFKGNTRPLETIYGLRAYNGKSYITQRVPLESIEPKEKKVRTIIDEVIKNDLLEKLNQKIDSKEWISMLQNYIHPKKKTIVKKVMIVVSEASIEKDSNGVERIGEFCDFGTKGTKHQFKHSKGHKGQILYFDEKGLVKVMPIYSNIRTQDIKDKLMTMGCKLYNKGEIFYSGCLVEIEKPFVATVYYKETDADGKEKTISVKQEVPYGIFKIRTIMGDGKIKLENNCGLEILSSAKVLVPLNMKKYKN

SEQ ID NO: 9060 - protein, 1025 aa, synthetic construct
  REGION 1..1025: note = Synthetic
MKKKVFAFDLGKASIGYCVRDGFNINEANSIIIDKDHAETTSLRDRRRIKRTLDAHKAREEFFNTIWSNVGLKILDKNDENFKKEFPTKDEDIIYTSCLLRIALLQNKKLEQWQIYKALHNAFQRRGYDVNIAWKSVQTDDDKENIELIKKYTCENDIELINSNEYKYPCYYDALRLGLWSEEEPQKLNKVIPHNNFNKVRTTNYVAPRKLVEKELKQLWLNAQLQLPQLNSISAEEFLYGEYKIPYGSCVQKEFKQYRGTKKDWQGVLCQKIPRFDNRIIAKCKLLPKRNVCKANTIENVSFVLLMKLKNLRFTDISGKKLQLNHVEIKQIYENWLEKIEDTYTKDLEKAKTLGKEQPKKRLDITITKKEIEKVIHNEIIDKIKPMEAEISGRSSFCRRACQIMNKVILSGEPSPQNIDISEFIDKDTARNGITEEEIQTMLSKIGDWDKLYVPDNREENAKNASNSRVKTDIMLGNITNPIVRNRLQIFRDLLLDLAEKYGTPDEVIFEFVRDGADNSLYGKIKAENNLKNLKANEKENEQIVKELKEAGLFIDGQNNTNAKYFLMHKLLKSQGGVCAYSGQKIAPTNYDECEIDHIYPRTLGGNDALYNKVVCYRRENQDKKGRTPYEWLSSDNDKWANYVNRLNKIKKQLGKKKFELLTSKPEDCEKLIESYNGLAETSHIARVAQQMTAFIFGWGLQIQGESRRIFVNNGSSTCAIRKRYGLNKLLGDDLKKNRSNDKHHALDAICISFSRDFKYDKDIKKDIIKGFNPEIVKDTIDKIMPYPYANDKPFKGNTKPLETIYGLRTYGDKSYITQRVELNSIDKKATKIKSIIDETIKNDLLNKLEENPTEQEWKLILQDYIHPKKKTKVKKVMIIVSEGEITKDSNDRKRIGEFVDFGTKGTQHQFKHSKRHKGQILYFNEKGVVEVMPVYSNIKTTDVKDKLQNMGCKLYNKGQMFYSGCLVDIPKPFKAGSKEYPAGRYQIKTIKSDKVAELEDACGNKISTNVKYLVPAEFKKVNSK

SEQ ID NO: 9061 - protein, 1000 aa, synthetic construct; identical to SEQ ID NO: 6364
  REGION 1..1000: note = Synthetic

SEQ ID NO: 9062 - protein, 1017 aa, synthetic construct; identical to SEQ ID NO: 6368
  REGION 1..1017: note = Synthetic

SEQ ID NO: 9063 - protein, 670 aa, synthetic construct
  REGION 1..670: note = Synthetic
MKKVFAFDLGKASIGYCVREEHEIKEVNSIIVDKDHSDISYIRDRKRVFKTKLAHKTRENFLETIWQNCNLEILPKNDKRWAKEFPNKNEKTIYNSCLLRIALLQNQKLENWQIYKALHGAIQRRGYDAQIAWGNDSEDDKENLKLTEKYTKENDKELINSENYKYPCYYDALRLGLWEEKNPETFVSFCPQENSNKVRTTNYVAPRGLVEKELYQLWLNAQKQIPELAKCSAEEFLYGEYKEAYGSFVNPEFKKQMGTEKDWQGVLGQKIPRFNNRIISKCKLLPKRNVCKANTIENVSVVLLMKLKNLRLTTNYGEKILLSPPQISEIYKNWLLKVEGRENKLDTTITKKEIENVINETIIDKIEPLKANVSGRSSFCKRACLILIDIIINGEMYPEEMDVTEYVDLPNSPNGIFEDEIRQMLGKIGGWNNLYIPDNRNENAEMASSSRVKTDIMIGNITNPIVRNRLQIFRDLLLDLTERYGKPDEIIFEFVREGADNSLFGKVKAQKAETAMKENWKANELIKKELEEIDSLSSNNFEKMKLLKMQAGKCIYSGKEIGVSDFNNCEIDHIFPRTMGGNDALYNKVLCYRIENQNKKGRTPYEWLSQDEEKWANYVNRLNTIKNSLGKKKYELLTSKPEDCAKLIDSYNGLAETSHIARVAQQIAAF

SEQ ID NO: 9064 - protein, 1014 aa, synthetic construct
  REGION 1..1014: note = Synthetic
MKKMVFGFDMGKASIGYCVREGHNIKCADSVIIDKDYAEVASSRDRRRVSRTKDSHKAREDYFNKLWLDCGLNVLDKNSPLFKKEFPSKGENTIYTSCLLRIALLQNKKLEEWQIYKALYNAFQRRGYDSELPWKNALGDDDKENLELVKKYTEKNGVELIQSDNYKYPCYYDALRLGLWSENESEIFKTAPTGDKVRCTKYVAPRSMVEKELVLLFNNAKKQLPSLSKFSAEEFLYGEYKEAYGSYKNPEFQKYMGKKEDRQGVLGQKIPRFSNRVISKCKLLPKRNVCSANTIENVTLVLLMKLKNLRITTVLGEKIILNHTQINSIYEEWLKKVEKRGGKLDATITCDEVAKVVGCKILNRFDPLKANISGRSSFCRRACNIMNDVILQGVKYPETLDIMPYIDAIGTQNGITEDEVRNILSKIGNWDNLYIPDNRDKNAEDADDIRQKTDIIIGNVTNPIVRNRLQIFRDLLIDLLEEYGKPDEVIFEFIREGDNSLYGSIKAKKAEAQMKKNEKENNEIRKELEDTDCYSVTNFEKLKLLRLQGGKCIYSGKNISVSDFDKCEIDHIFPRTLGGNDSLSNKVLCYREENQKKAGRTPYEWLSNNDEVWADYTSRVNCLKSSLGQKKFELLTSKPEDCIELIDSYNGLAETGHIARVAQQIAACIFGWGLQVEGEERRIFVNNGASTSAIRRRYGLNKLLGDDIKKNRKNDKHHALDAICISYSREFKYDKEKDKDIIEGFNPECVKKIIDKIIPYPYTHKKPLKGGIRPLETIYGLRIYNDKSYITNKISISTIEPKEKKIKTIIDEVIKNDLLEKLESGISVKDWANMLENYIHPKKKTKVKKVLTVVSEGSLEKDLNGRERIGEFVDFGTKGVKHQFKHSKQHKGQILYTNEKGNIKVMPVYSNIKLDEIKEKLQKMNCTLYNKGMMFYSGCLINIPNEFEASVYYDIKDEEGNVKTKAVRETVPAGIFKLRTMASDGTTKIENNNGVEILTSAPNLAKAKFYKCKS

SEQ ID NO: 9065 - protein, 998 aa, synthetic construct
  REGION 1..998: note = Synthetic
MKKRIFAFDLGKASIGYCVREDNEIKCANSIILDKDYGEIASQRDRRRIKKTLDAHKAREEFFNNLWIKAGLEILTKDDERFKKEFPSKNENEIYTSCLLRIALLQNKTLKHWQIYKALYNAIQRRGYDPNVKWANNSDDDKKNIELLEKYTKENDTDIIQNEIYKYPCYYDALRLGLWDEKMPEEFKRAIPIENNTKVRSTDYVAPRNLIIKELSRLWENAKKQIPQLSKITTEEFLWGDYREQYGSLVNPDLRKFMGRKEDWTGVLGQKIPRFENRIISKCKLLPKRNVCKADTFENATFCMLMKLKNLRFTNIYGEKCKLNFEDINLIYNNWLEKIKSKEGKLDTTITKPEIEKLLGIKILDKIEPMKINISGRSSFCRRACEIMKKIILSGQNPLDIDVSEFIDNPNTQNPITKQEIEQMLLKAGTWENLYVSDNRDENSQDFTDLRIKTDIILSNVTNSIVKNRLQLFRDLIFKLVKEYGVADDVIFEFVRQDSLEGKKRAKSYEDMIKKNEKDNEVIKKELESVNAKNKENFLKLKLLKMQGGKCIYSGKPIEITNFDACEIDHIFPRTYGGNDELSNKVLCFREYNQQKAGRCPFEWLSKDENIWVDYVDRLNKIKTTLGNKKFELLTSPKEKCIELIGSYNGLAETGHISRLAQQITAVIFGWGLGVKDENRHIFVNNGSSTSKIRRQYHLNSLLGDDEKKNRENDKHHALDAICISYSREYKYNKEKDCDEIKDFPIEQIKKVINEIMPMPYAHKKVQKQTVRPLETIYGKRTYGDKEYITNRTDITRIEMKDSKIKSIIDNAIKNDLLEKMAQNPDKKTWENYLSNYYHPLKKTKVKKVMLIESEGKFEKDSNGRERMGEFVDFGSKGTIHQFKHSKAHKGQILYFDNKNNVKVMPIYANIKTQEVKNKLAEMGYKLYNKGQIFSSGCLVQVSNDFKGGKNTYPKGIYKVRTIMSDGKVKLESNNGIEILTSAKNLAEAKFHKAHVDF

SEQ ID NO: 9066 - protein, 1001 aa, synthetic construct
  REGION 1..1001: note = Synthetic
MKKRIFAFDMGKASIGYAIREDNEIKAAGSIIIDPDHGEIASKRDRRRISRTLLAHKSREAFLKETWQKCNLEVLKKDDEKFKKEFPSKNETTIYTSCLLRIALLQNKPLENWQIYKALHNAIQKRGYDPDVPWKTDQSEDDRTNIELIKKYTQENNIELINSDEFKYPCYYDALRLGLWSEDKPYRFNRSIPFDNFNKVRSTNYVHPRKFIVKELCALWKNAQKQISELEKISVEEFLYGNYKEAYGSYKNPYLKKYRGKKEDWTGVLGQKIPRFDNRIISKCRLLPKRNVCSANCIENVTTVLLMKLKNLRLKLSDIEGNKISLSSENINQIYNNWLKKMQEKGKLDATITQKEIEKVIGVKLLGKIEPMSANISKRSSFCRRACNIINKIILEGIEPAELDINEFLDSKGTKDGIFEEEIRQMLTRIGNWENLYISYDKKKNNQDFDSIRTQTDLIIGNITNSIVKNRLQIFRDLLFHLIEKYDIADEIIFEFPRDDSLYSAKRVLDWQTRVKNNKKQNETIAKELEGINKLSPNNIIKIKLLQQQTGKCIYSGKSIGMEDLDRCEIDHIYPRTKKGNDALTNKVLCYSEYNQQKGARTPYEWLYNTENWGAYLNRVNSLKESLGKGEKDSSKNLKFQLLISPPEVCEELIDSYRGLAETGYIASVAQQICSVVFEWGLGEKGKKRHIFVNNGRNTSQIRKKYELNSLLGNSEEKNRDNDKHHALDAICISFSRDYKNGHIEGFDKKKVENAINKIIPYPYSHKKPLKKNTNPLETIYGKRVYDTKACIVNRVNITSIEQKTSKIESIVDSVIKNDLLEKLSCNLDKKAWINMLENYIHPKKKTRVKKVLTIVTNGILEKNESGIERIGEFCDFGSKGTKGQFKHSKGHKGQILYYNEKNTIKVMPVFSNQKTQEAKDKLIQTGCKPYLRGQIFYSGILVEIPNDFQGGKNTYSKGIYKLRTITTAGQIKLEDNNGNEILTSASNLVEKGFKKANIDF

SEQ ID NO: 9067 - protein, 1001 aa, synthetic construct
  REGION 1..1001: note = Synthetic
MSKRVFGFDLGKVSIGYCVREEHEIKEANSVIIDISHSDVTSLKERRKVKRTLSAHKAREKYFDKIWEECGLNILPKDDIRFTKEFASKEENIIYNSCLLRIALLQNEELEEWQIYKAIHNSLQRRGYDSNLVWKAVQNDDDKENIELVKKYTQDDGIELIKNEEYKYPSYYDAVRLELWAESEPEHFRRFISKENYNKVRSTQYVAPRNLVEKELRQLWINAQKQLSELRKITVEEFLYGEYREPYGSYVNPFFRKYLGTERDWQGVLGQKIPRFNNRIIAKCKLLPKRNVCKANTIENVSLILLMKLKNLRLTDNLGEKFRLNACEIREIYDNWFEKTKNRENKLDTTITKKEIESVIGRKIIDKIDPMKADISGRSSFCRRACEIMKEVILSGEPSPLNMDISKFVDPENTKNGITSDEINNMLSRIGNWDNLYIPDNRDESISISDNVREQTDLMIGNITNPVVRNRLQIFRDLLLRLADDYGKPDEVIFEFVREGANNSLFGKIKAQSAESYMKSQEKENKIIKEELEAVNALNSINFEKLKLLKKQAGRCIYSGLPIEISDFNRCEIDHIYPRTLGGNDALYNKALCFRTENQNKKGRTPYEWLSSDKERWTLYVNRLNSIKKELGKKKFELLTSNPKDCEKLIESYNGLAETSHIARVAQQITSLAFGWKLQAEGENRHIYVCNGSSTAAIRKRYGLNSLLGDEKKKNRENDKHHALDAICISYSRDFKYDKNLNKDVIAGFNPEIIKKVIERMVPFPFANKKPLKSSIRPLETIYGKRIIDNNACITNRIPLEKIEPKDSKIKSIVDKDIRQDLLKKLEEKPTQEQWQKFLSEYIHPKKKTKVKKIMIVVSKGTLEYDLNGRERIGEYCDFGTKGTKGQFKASKMHKGQILYYNEKGVVKVMPVFANKKIREVRDKLSKMGCKLYCRGSLFYSGCLLIIPNDFKAGSTIHPSGIYKLRTIKSNGSVKLENSNGVEIDSSVKNLTDANFKKYKS

SEQ ID NO: 9068 - protein, 1008 aa, synthetic construct
  REGION 1..1008: note = Synthetic
MKRIFAFDMGKVSIGYCVREDNDIKEANSIIIEKDHGEIISIRDRRRVYRTLEAHRARENYLNNVWEGCGCNILDKSDLRFKKEFASSNEDIIYNSCLLRIALLQNKKLEEWQIYKAIHSAIQRRGYDPDLAWKNSLGDDDKENQELIQKYTQENGVELIVDEQYQYPCYYDALRLGLWCENEPNILKRFIPLGNSNKVRTNLYVAPRKLVEKELRDLWICAQNQLPKLEKISVEEFLYGEYKQAYASFVDSKFKKYMGRKEDWQGVLGQKIPRFDNRIISKCKLLPKRNVCKANTLENVSLVLLMKLKNLRLTMLGGSKKRLNPIEINEIYENWLKESNNGEKLATTITKTKIEKVLGEKISDETKYINDSLKANTSGRSSFCRRACEIMKDIILEGELYPETIDISKYVDPVGTRNGITEDEIRSMLSKIGDWNNLCIPDNRDENAQVGDNSREKTDLMIGNITNPIVRNRLQIFRDLLVDLAETYGKPDEVIFEFVRDGADNSLFGRVKAQSFEQLIKRNEKENEQIKKELEDVGALSAINFEKYKLLKMQGCKCIYSGQPIAISQLDMCEIDHIYPRTYGGNDALYNRVLCYRSENQKKQGRTPYEWLANDKEFWADYVHRLTGIKQSLGKKKFELLTSKPEDCAKLIDSYNGLAETSHIARVAQQIAAFVFGWGLQIEGEKRHIFVNNGATTAAIRRKYRLNSLLGDDLKKNRSNDKHHALDAICISYSRNFKYNKENKRDEIIDLGLNDTEFNQMVKKVIDDIIPYPYTNSKPFKGNTRPLETIYGLRTYGDKSYITNKIALTSIEQKEKKIKTIVDEVIKSDLLAKLEEKMTSDEWLKMLEDYKHPTKQTKVKKVLTIVSEGIIEKDQNGRERIGEFVDFGTKGTKRQFKHSKGHKGQILYYNEKGTIKVMPIYANQNTEFVKQKLRESGCKLYNNGQVFYSGCLINVLKEFKAGSSIYPAGIYKLRTMKSRGEILLENNCGIEIWTSATYLTQAKFVKSN

SEQ ID NO: 9069 - protein, 1016 aa, synthetic construct
  REGION 1..1016: note = Synthetic
MFYDIIKKKEVFMGKKVFAFDLGKASIGYCVREDATIKEVNSIIVDKDHGEIISQRDRRRVERTLLSHRAREVYFNKIWKDCGLKPFDKEDIKFKKEFAKKDDDTIYTSCLLRILLLQNKKLAEWQIYKALHNAFQKRGYDTNIAWKSSYSDDDKENIALVEKYTQKNGVELINSEEYKYPCYYDALNLGLWEENTPNEFKRFIPQENSSKFRVKSAVAPRILVEKELIKLWQNAQKQLPQLEKYCVEEFLYGDYFIAYGSFYNPELRKFMGTERDWQGVLGQKIPRFDNRIISKCKLLPKRNVCKANTLENVSLVLLMKLKNLRVTSIYGEKIRLNPGEIKIIYENWLEKSASKNNRLDVTITKAEIEDVIGQKISDKIEPMKANISGRSSFCRRACQIMIDIIIEGELYPETIDVSKYIDPAGTKNGITETEIKTMLSKIGDWNNLYIPDNRDENAQMADSTREKTDIMIGNITNPIVRNRLQIFRDLLSRLYLDYGKPDEVIFEFIREGADNSLYGKAKAQAAEAAMNKNFKDNEKIKEELESVNAYDASNFEKLKLLKMQGGKCVYSGKPIAISNFGECEIDHIYPRTMGGNDALYNRVLCYRIENQKKAGRTPYEWLSQDETNWTLYVKRLSDIKQSLGKKKFELLTSKPEDCEKLIDSYNGLAETSHIARVAQQITAFTFGWGLQVEGEKRHIFVNNGSTTAAIRKRYGLNSLLGNDFKKNRENDKHHALDAICISYSRDFKYDKSSGKDIIMVDGFNTHDIAKAIETIIPYPYSNKKPFKGNTKPLETIYGLRTYGDKSYITQRVELISIKPDEKNIRKIIDEVIKSDLIEKLALKPTNTEWVKMLETYVHPKKKTFVKKVMIIVSEGPIERDSNGRERIGEFADFGTKGVKHQMKHSKGHRGQILYYTAKGTVKVMPVYANKSIKDVTEKLQEMGCKLYNGGQMFYSGCLIDVPNEFKAGKETYPAGVYKLRTVMANTGAIKLENNNGIEILTSATYLAQAKFSKYKC

SEQ ID NO: 9070 - protein, 681 aa, synthetic construct
  REGION 1..681: note = Synthetic
MFYDIIKKKEVFMGKKVFAFDLGKASIGYCVREDATIKEVNSIIVDKDHGEIISQRDRRRVERTLLSHRAREVYFNKIWKDCGLKPFDKEDIKFKKEFAKKDDDTIYTSCLLRILLLQNKKLAEWQIYKALHNAFQKRGYDTNIAWKSSYSDDDKENIALVEKYTQKNGVELINSEEYKYPCYYDALNLGLWEENTPNEFKRFIPQENSSKFRVKSAVAPRILVEKELIKLWQNAQKQLPQLEKYCVEEFLYGDYFIAYGSFYNPELRKFMGTERDWQGVLGQKIPRFDNRIISKCKLLPKRNVCKANTLENVSLVLLMKLKNLRVTSIYGEKIRLNPGEIKIIYENWLEKSASKNNRLDVTITKAEIEDVIGQKISDKIEPMKANISGRSSFCRRACQIMIDIIIEGELYPETIDVSKYIDPAGTKNGITETEIKTMLSKIGDWNNLYIPDNRDENAQMADSTREKTDIMIGNITNPIVRNRLQIFRDLLSRLYLDYGKPDEVIFEFIREGADNSLYGKAKAQAAEAAMNKNFKDNEKIKEELESVNAYDASNFEKLKLLKMQGGKCVYSGKPIAISNFGECEIDHIYPRTMGGNDALYNRVLCYRIENQKKAGRTPYEWLSQDETNWTLYVKRLSDIKQSLGKKKFELLTSKPEDCEKLIDSYNGLAETSHIARVAQQI

SEQ ID NO: 9071 - protein, 1032 aa, synthetic construct
  REGION 1..1032: note = Synthetic
MKKVFAFDLGKASIGYCVREDLEIKEAESIIIDKDHAEVISNRDRRRVSKTLLAHKERENFFNKIWKECGLIPLEKDNELFKKEFAKNNDNTIYNSTLLRIALLQGRKLEQWQIYKAIHSAIQRRGYDSNLPWANANSKNADDEENEKLAIKYTQENEKELIFNDEYKYPCYYDATRLGLWNEDNPNEFKAFIPQDKVIKVRTTGLVAPRFLVEKELTRLWEKAQEQLPQLNKITTEYFLYGEYEQAYGSYTKKEFKQYRGTVRDWQGVLGQKIPRFDNRIIMKCKLLPKRNVSKAATIENIIFTLAMKLKNLRLNTVDTALGEDKRRLSPTEIKEIIENKREKDNWDEKLLTIKDGKNPTFTITKSDIEAVIGKKSIVDKLEVMKANISGRSSFCRRACAIMNKIILTGELYPQDMDISEFIDKEGTPNGITEEEIREMLSKIGDWNNLYIPDNRNELLQMDVSTREQTDIVIGNITNPIVRNRLQIFRDLLIRLKKEYGTPNEVIFEFVREGADNSLMPGKKANDILRQQKEHEKENEQLVKELKEVDTYSPANFDKYKLLKMQDMRCIYSGRPIGINDLDKCEIDHIYPRTMGGNDALYNRVLCYAIENQNKSGRTPYEWLHNDTSRWEEYFQRLNNIKQKLGKKKFELLTSKPEDCAKIIDSYNGLAETAQIARIAQKLTSLVFDWGMQTKGDERHIFVNNGSSTFAIRKRYGLNKLLGDDVKKNRSNDKHHALDAICISFSRDFKYDKEKKTDIIDGFTYEMVKEAIDKIMPYPYANDKPFKGNTKPLETIYGLRTYNGKNYITNRVSIESIEQKEAKIKSIVDEYIKNDLLEKLALKMSAKEWTEMLKNYVHPKKQTKVKKVMLVVSEGNIEHDSNGRMRIGEYSDFGNKGVKKQFKHSKGHKGQILYYNEKGKIKVMPVYANKKTQDIKDKLISMGCKLYNKGEMFYSGCLLNINNSFDGTVYYKTMDENKKEKIISIKQSIPAGIYKLRTIMGNGGIKIENNSGSEILTMANILTDAKFSKLKN

SEQ ID NO: 9072 - protein, 997 aa, synthetic construct
  REGION 1..997: note = Synthetic
MNKKVYAFDLGKASIGYCAREGFNILDLGSLIINKDHAEVVSNRDRRRVHKTLLAHRTREEFFNKLWKDCGLEILDKSDKRFTIEFAKNNDSILYNSILLRIALLQNKPLEEWQIYKSLHNAIQRRGYDANLVWANDSDDEKTNKELAARYMQDEAGIELITNDEYKYPCYYDATRLGLWNEEAPNKFNRHIPLTDVTKVRTTGLVAPRQLVEKELTQLYLNAQKQLPQLNKYSVEYFLYGKYGRAYATFRKPEHGREKDYGVLGQKIPRFDNRIISKCKLLPKRNVCKAATLENVSFTLLMKLKNLRFTAPDGNKHMLSADAIREIYENWLQESNNGEKLNTTITKTKIEKVIGFKMLDDTKNINETLKANINGRSSFCRRACQIMNKIILEGIENPATMDVAEFTDDITAHNGITEAEIREMLSKIGTWDNLYIPDNRYEMAELSSDDRQKTDLIIGKITNPIVRNRLQILRDKLLELKSEYGTPDEVIFEFIRDGADNSLYGAKKSNDYLKNIKENEKENLEIKKELEDVDRYSPTNFEKLKLLRMQGGKCIYSGKPICIDDFDKCEIDHIYPRTMGGNDALYNRVLCYSIENQNKKGRTPYEWLSNDKEYWSAYVDRLNKIKGSLGKKKFELLTSKPEDCEKLIESYNGLAETAQIARVAQQLAAFIFGLGMQTEGDKRHLFVNNGSTTAAIRRRYGLNKLLGDDVKKNRENDKHHALDAICISFSRDFKYDEKSKKDVIEGFTYDFVKKAIDELIPYPYANDKQFKGNIRPLETIYGYREYGNKKYITNRVDITTIEQKEKKIKTIVDEYIKKDLLDKLNLSSSEWVELMKNYKHPKKHTIVKKVLTLVSEGEISKDSNDKSRMGEYADFGTKGVANQFKHSKGHKGQILYYNEKGAIKVMPIYANQKLSDVKQKLMSMGCKLYKKGMMFTAGCLLNIPNDFYVSENLYTSGIYKLRTIMSSGQIKIENSNGKEIITSAKYLTDANFLKYKN

SEQ ID NO: 9073 - protein, 926 aa, synthetic construct
  REGION 1..926: note = Synthetic
MNKKVYAFDLGKASIGYCARDGFNILELGSLIINKDHAEVVSNRDRRRAYKTLQAHKSREEFFIKLWQDCGLPVLEKNDKRFTIEFSKEKDETLYNSTLLRITLLQEKPLEVWQIYKALHSAIQRRGYDANIRWANDSDDEKENQERVTKYTQDENGIQIITNDAYKYPCYYDAVRLGLWDEKNPLEYKKHIPLQGVTKVRTTGIVAPRSFVEKELTQLYINAQKQLPQLEKYSVNYFLYGKYGKAYATFHKQEQGKEKDYGVLGQKIPRFDNRIIAKCKLLPKRNVCNAGTIENVSFTLLMKLKNLRFTNANGERCMLDSSAIKEVYENWLKKANKDNEIKLDTTITKKEIENVIGFKIQDKIEPMKTNISGRSSFCRRACQIMNKIILEGIENPATMDVAEFTDNVDSPNGITEQEIREMLSKIGTWENLYIPDNRYEMAELSSDDRQKTDLLIGNITNPIVRNRLQILRDKLLELKAEHGTPDEVIFEFVRDGADNSLYGAKKANGYLKNIKENEKENNEIKKELEEANAYSPTNFEKLKLLRMQCGKCVYSGKNISINDFDSCEIDHVYPRTMGGNDALYNRVLCYSIENQNKAGRTPYEWLSSDKELWANYVARLNDIKGSLGKKKFELLTSKPEVCEKLIESYNGLAETAQIARVAQQLAAFIFGWGMQTEGDKRHLFINNGSTTAAIRRRYGLNKLLGDDIKKNRENDKHHALDAICISFSKDFKYDHKSKKDIIEGFTYDFVKNEIDKLIPYPYANDKPFKGNTRPLETIYGYRKYGDKNYLTNRVDITSIEQKEKKIKTIVDEVIKNDLLEKLNLSSGDWAAMLKNYKHPKKHTIVKKVLTIVSEGTITTDSNNKSRMGEYADFGNKGVKNQFKHSKGHKGQILYYNEKGAVKVMPIYANQKLSEVKEKLLAMNCKL

SEQ ID NO: 9074 - protein, 996 aa, synthetic construct
  REGION 1..996: note = Synthetic
MEKVFAFDMGKASIGYCAREGFNILELGSLIIDKDHAEVISNRERRRTRKTLEAHKKREEFFDKLWLDCRLSVLERTDKRFKIEFSTKDDDTIYNSALLRIALLQNIPLKDWQIYKAIHSAIQRRGYDAEIAWANVSSSDEKDNQERVSKYTQDETGKELINNNEYKYPCYYDAYRLGLWTEENPAKLNRYIPLTNANKVRTTGFVAPRSFVEKELRQLYINAQKQLPQLMKFPVEYFLYGQYGAAYATFRTSNQGREDNYGVLGQKIPRFDNRIIAKCKLLPKRNVCKANNLENVTFTLLMKLKNLRFTDIQGNKWALDYSAISDIHSNWLAKAYKEGEIKLDTTITKKEIETVIGIKIQDKIEPMKANILGRSAFCRRACQIMNKIILEGIKEPINMDITDFVDPENTSNPITEGEIREMLSKIGTWDNLYIPDNRYEMLELSSDDRQKTDLLIGKITNPIVRNRLQILRDKLLEMKGKYGTPDKVIFEFIREGADNSLYGAIKAQDELNRMKANEKENEKIVKKLKDNDAYSPTNFDKLKLLEMQGGKCVYSGKNIGISDFDKCEIDHIFPRTMGGNDALYNKVLCYSIENQNKKGRTPYEWLSSDKDEWAKYIKRLSEIKSSLGKKKFELLTSKPEDCAKLIESYNGLAETAQISKVSQQLAAFIFGWGMQTKDDERHLFTNNGSTTSAIRRRYGLNKILGEDIKKNRENDKHHALDAICISFSRDFKYDEESGKDVIKGFTYDFVKNEIDRLIPYPYSNDKPFKGNIRPKETYYGKRKVNGKYKLTERTEITDIKRNKKDVEKIIDEVIKNDLLDKLNLTSDEWINMLQDYKHPKKQTKVKKVRTLIDCNAELTYDGNGRERFDVYVDFGNKGTKGQFKRSKGHKGQILYYDNKGSIRVMPIYANKSTQEVKDKLINMGCKLYRGGEMFHSGCLVEIPNDFKAGANTYPKGTYKLRTIKSGGEVKLENNVGIEIVSSAKYLTNAEFYKRKN

SEQ ID NO: 9075 - protein, 1004 aa, synthetic construct
  REGION 1..1004: note = Synthetic
MNKKVYAFDLGKASIGYVAREGFNIFEIGSVIIEKDHAEVVSNRERRRTYKTLKAHKTREKFFDNLWTDCNLEVLDKSDKRFTVEFSNKNDDTIYNSALLRIALLQNKKLETWQIYKALHSAIQRRGYDTNVAWANASSDDEKKNIELSNRYTKNENGIELIENPEYFYPCYYDAVRLGLWDENNPNEFKRILPQIDLIKVRTAGIVAPRELVEKELINLYLNAQKQLPQLEKYSVNYFLYGEYGEKYASYNNPEYKRYRGREKDSEGVLGQKIPRFDNRIISKCKLLPKRNVCKAETLENVIFTLLMKLKNLRITLTEGEKYFLNPEAIKLIYENWVTKATTSGDFKLDTTITKKEIEKILGIKILDKIEPMKANLSGRSSFCRRACQIMNKIILYGVENPLEMDISEFIDDENSPNGITEDEIKTMLSKVGNWYNLYIPDNRYEMQELSTDERQKTDIFIGSVTNPIVRNRLQLLRDKLLCLKEQYGTPDEVIFEFVRDGADKSLYGSKKANDYLASLKKNEKENEEIIKELKDCDSLSAINFEKLKLLRKQGGACIYSGKKISISDFDACEIDHIYPRTLGGNDAIYNKVLCYSIENQKKKGRTPYEWLSGDKEYWNIYVKRVNDLKQSLGKKKFELLTSKPEDCEKLIESYNGLAETAQISKVAQQLTAFVFGWGLQTEGSKRHIYTNNGSITSSIRKRYGLNKILGDDIKKNRENNKHHALDAICISFSREFKYDESSKKDIIEGFTYDFVKNAIDNLIPYPYANKKPFKGNIRPKETYYGKRLVEGKWKLTERTELAEIKQDKKTIEKIVDEFIKKDLLEKAEKLSKDEWQEFLKSYIHPKKQTKVKKVRTLIGCNAEASFDENGRERFDTFVDFGTKGTKGQFKRSKGHKGQILYYDKKGKVKVMPIYANIKTSEVKQKLSDLGCELYKKGMIFVSGSLVDIPNDFKSSSNTFPAGTYLLRTIRSDGFVMLENDKGNEIPPMNINYLAEAGMIKHKN

SEQ ID NO: 9076 - protein, 1013 aa, synthetic construct
  REGION 1..1013: note = Synthetic
MGKRVYAFDLGKASIGFCAREDFNILELGSLIVDKDHAEVISNRDRRRVYKTLYAHKNREDFFNKLWSDCGLNILEKDDKKFTTEFSKPNDNTIYNSALLRIALLQDKQLEEWQIYKALHNAIQRRGYDADIAWANASSADEKDNIERVSRYTQDDKGIEIIKNEKFKYPCYYDALSLSLWEENNPAEYKKHLPLADITKVRTKGLVAPRAFVEKELTELFFKAQKQLPQLNKYSVEYFLYGQYGSAYATFRKPEQGKEKDYGVLGQKIPRFDNRIIAKCKLLPKRNVCKANTKENVSFTLLMKLKNLRFTDSLGNKCMLDSEAIKEIFNNWLIKANKNDILKLDTTITKKEIENVIGCKIQDKIEPLKANISGRSSFCRRACQIMNKIILEGIQNPATMDVAEFTDDINSDNGITEAEIREMLSKIGTWDNLYIPDNRYEMAELSSDDRQKTDFLIGKITNPIVRNRLQILRDKLLELKDKHGIPDSIIFEFIRDGADNSLYGAKKANDYLKNTKENEKENLEIKKELEDANAYSPSNFEKLKLLRMQGGACIYSGNKIGIGNFDECDIDHIFPRAKGGNDALYNRVLCYSKLNREKGDRTPYEWLSSDREEWAKYLLHLNDLKSSLGKKKFELLTCKPQDCEKLIESYNGLVETAQIAKVAQQLAAFIFGWGLQTEGDKRHLFVNNGSTTAAIRRRYGLNKILGNDIKKNRENDKHHALDAICISFSQDFKYDPKSKKDVIQDFTYDFVKNAIDKLIPYPYSNDKPFKGNTRPLETIYGYREYGEKKYITNKIDISTLEQKEKKIKTIIDETIKNDLLNKMNLSKEDWKNMLQNYIHPKKQTHVNKVMVIVSEGKLDFDKNGRARMNEYVDFGTKGVKNQFKHSKGHKGQILYYNEKGAIKVMPIYANQKTLDVKLKLLDMGCNLYKKGIIFSSGCLVEIPNDFEANVYYHLADNDGKDKLVPTKEKVNNGIFKIRTIMSDGKVKLENNNGIEILTNAATLVNANFHKYKI

SEQ ID NO: 9077 - protein, 1018 aa, synthetic construct
  REGION 1..1018: note = Synthetic
MNKKVYAFDLGKASIGFCAREDFNILDIGSLIIDKDHAEVISNRERRRIKKTLDAHKNREEFFDKLWLTCGLSVLEKSDKRFKTEFALKNDETVYNSTLLRIALLQNKPLKEWQIYKALHSAIQRRGYDPDIVWANASSSDEKNNKERVAKYTQNESGQELIINEEYKYPCYYDALKLGLWSEDKPQELKRHIPLANTAKVRTTERVAPRSFVEKELTQLYLNAQKQLPQLKFDVEYFLYGEKKKAYATFRTKEQGREKDYGVLGQKIPRFDNRIIAKCKLLPKRNVCKAADLDSVTFTLLMKLKNLRFTDINGEKGFLDSSAISEIHKNWLVKANKGEKIKLDTTVTKKDIEDVIGVKIQDKIEPMKANISGRSSFCRRACQIMNKIILEGIENPVEMDLTEYIDPNSSPNGITEEEIREMLYKIGTWDNLFIPDNRYEMVELSSDDRQKTDLLIGKITNPIVRNRLQILRDKLLELKKAYGTPDEVIFEFIREGADNSLFGAIKAQDALKRMKDNEKKNEELGQKLKDNNIYSSTNFDKLKLLEIQGGKSVYSGKPIGIENFDECEIDHIYPRTMGGNDALYNKVLCYSSENQEKAGRTPYEWLSPDKDKWAKYVNRLSDIKSSLGKKKFELLTSKPETCEKLIESYNGLAETAQIAKVAQQLAAFIFGWGLQTVGDKRHLFVNNGSTTAAIRRRYGLNKILGDDVKKNRENDKHHALDAICISFSRDFKYDPDSKKDVIKGFTYEFVKNEIDKLMPYPYSNDKPFKGNTKPLETIYGYREYGSKKYITGRVDITELEQKEKKIKTIIDEIIKNDLLEKINLPKEEWVNLLKNYIHPKKQTHVKKVMVVVSEGEIDYDSNNRMRMGEYVDFGKKETEKSEGAKHQFKHSKGHKGQILYYDEKGVIKVMPVYANKKTSEVKQKLLDIGCKLYKKGMMFTSGCLVEIPKDFDANVYYHKIDENGKDKLIPNKELVKNGIFKVRTIMSNGAIKLENNCGQEILTSVSVLTNIEFKKYKP

SEQ ID NO: 9078 - protein, 1023 aa, synthetic construct
  REGION 1..1023: note = Synthetic
MKKKVFAFDLGKVSIGFCARDNFNILDLGSIIIDKDHAEVVSNRDRRRVYKTLQAHKAREKFFNNLWLDCGLEILDKTDKRITIEFAPKDDEIIYNSALLRVALLQNKKLEQWQIYKALHNAIQRRGYDSQLAWANAKSDDDKENEERVAKYTKDENLAELILNDEYKYPCYYDALRLGLWEEENPTTFKRHIPLNNIEKIRTSGLVAPRRFVEKELKQLYINAQKQLPSLEKYSVECFLYGEYEQAYGSYYLNEFKQYRGTEHDWQGVLGQKIPRFDNRIISKCRLLPKRNVCKADTLENVSVVLLMKLKNLRFTGEDGEKYYLSAEHIKLLYENWKEKALQANQSFKLDTTITKKEIEKVIGFGILDKIEPMKANISGRSSFCRRACNIITHIITEGVENPATMEVSLFVDPLGAKNGITEQEIREMLNKIGTWDNLFIPDNRYEMLSQASDEREKTDLLIGSLTNPIVRNRLQIFRDKLLEMKIQYGEPDEVIFEFVRDGADNSLYGSKKAQATLKAMKDNEKKNEDIAKKLKDVNAYSATNFDKLKLLEMQDGRCIYSGKEIAISDLDKCEIDHIFPRSRGGNDALYNRVLCYSIENQNKKDKTPYEWLHNNDEIWNDYVKRITELKKENKINKTKFELLTSKSEDAEKLIESYNGLAETAQIARLAQQITAFVFGWGLQTLGDKRRVFVNNGSSTASIRRRYGLNKILGDDVKKNRENDKHHALDAICISFSREFKYDPIFKKDVIKGFTYDFVKEEIDKLIPYPYANKNPFKGNTRPLETIYGYRAYNGKSYITNRIDITTIEQKDKKIKIIVDEVIKNDLLNKLEEKMSAKDWALMLENYIHPKKQTKVKKVMVVVSEGNIEKDSNGRVRLGEYVDFGTKGTKHQFKHSKGHKGQILYYNEKGTVKVMPIYANQKTQDVKDKLMQMGCKLYKGGMVFYSGCLVNVPKEFEANVYYKTIDNNGKEISKPQKEIIQPNIFKVRTIMSNGGIKLENNSGIEILSSANTLIECEITKLKS

SEQ ID NO: 9079 - protein, 1028 aa, synthetic construct; identical to SEQ ID NO: 6366
  REGION 1..1028: note = Synthetic

SEQ ID NO: 9080 - protein, 1028 aa, synthetic construct
  REGION 1..1028: note = Synthetic
MNKKVFAFDLGKASIGYCVREDLKILEAGSLIINKDHAECISNRDRRRVQKTLLAHKKRESFFNKLWQNCDLNILNKDDKRFSTEFGKKNDSTIYNSTLLRIALIQNKPLEEWQIYKALHNAIQRRGYDSKLPWANAKSDDDRKNEELSARYTQNEQGEELIQNENFKYPCYYDAVRLSLWSENMPEKLQTYVPLDNVKKIRDAGIVAPRNLVEKELKQLYINAQLQLPQLNKYSVEYFLYGEGEVAYASYNKKDYKCHRGTEWDMQGVLGQKIPRFDNRIIAKCKLLPKRNVCKANTLENVSFVLLMKLKNLRYTNINNEYSMLSADTINKIYQNWLNKALKDDGSYKLDTTIIQKEVEKVLGEKIQDKFEPLKANISGRSSFCRRACKIMNHIILNGIEDPSTMDVAEFTDNIDTPNGITEAEIRTMLSKIGTWENLYIPDNRYEMAELSSDNREKTDILIGNITNPIVRNRLQVFRDKLIELKQKYETPDKIIFEFIRDGADNSLYGAKKAQDFLKTIKENEKTNNDLAIELKNADCFSVVNLEKLKLLKQQDGICIYCGQRIGISDLDKCEIDHIYPRSRGGNDAISNKVLCYSIENQKKKDRTPYEWLHNDERTWADFVNRAKLLKDKLKKTKYTLLTSKPENCEELIKSYNGLAETAQIARVAQDITAFIFGWGLQLKDEKRRIFVNNGASTSGIRKTYRLNKLLGNDVKKNRSNDKHHALDAICISFSQNYKYNKYTKRDEIEGLDIHDNKFRELIKQTLDAIIPYPYTNDKPFKGNTKPLETIYGYRCIDNKHYITQRVSLETIEQKDKKIKCIVDEVIKNDLLEKIKEKMPTKDWTTMLQNYIHPTKQTKVKKILVIVSEGELTKDSNAHSRIGEYADFGTKGTKHQFKHSKGHKGQILYYNEKGVIKVLPIYANQKDSDVKSYIEQNGCKLYKKGMKFYSGCLIQINKDFEATAYYTQTDENGNDKQIPTKEKLQAGVYKLRTMMIDGKVKLESSTGIEIVTRAKVLVEADFSKFSKY

SEQ ID NO: 9081 - protein, 1028 aa, synthetic construct
  REGION 1..1028: note = Synthetic
MNKKVFAFDLGKASIGYCVREDLKILEAGSLIINKDHAECISNRDRRRVQKTLLAHKKRESFFNKLWQNCDLNILNKDDKRFSTEFGKKNDSTIYNSTLLRIALIQNKPLEEWQIYKALHNAIQRRGYDSKLPWANAKSDDDKKNEELSARYTQNEQGEELIQNENFKYPCYYDAVRLSLWSENMPEELQTYVPLDNVKKIRDAGIVAPRNLVEKELKQLYINAQLQLPQLNKYSVEYFLYGEGEVAYASYNKKDYKCHRGTEWDMQGVLGQKIPRFDNRIIAKCKLLPKRNVCKANTLENVSFVLLMKLKNLRYTNINNEYSMLSADTINKIYQNWLNKALKDDGSYKLDTTIIQKEVEKVLGEKIQDKFEPLKANISGRSSFCRRACKIMNHIILNGIEDPSTMDVAEFTDNIDTPNGITEAEIRTMLSKIGTWENLYIPDNRYEMAELSSDNREKTDILIGNITNPIVRNRLQVFRDKLIELKQKYETPDKIIFEFIRDGADNSLYGAKKAQDFLKTIKENEKTNNDLAIELKNANCFSVVNLEKLKLLKQQDGICIYCGQRIGISDLDKCEIDHIYPRSRGGNDAISNKVLCYSIENQKKKDRTPYEWLHNDERTWADFVNRAKLLKDKLKKTKYTLLTSKPENCEELIKSYNGLAETAQIARVAQDITAFIFGWGLQLKDEKRRIFVNNGASTSGIRKTYRLNKLLGNDVKKNRSNDKHHALDAICISFSQNYKYNKHTKRDEIEGLDIHDNEFRELIKQTLDAIIPYPYTNDKPFKGNTKPLETIYGYRCIDNKHYITQRVSLETIEQKDKKIKCIVDEVIKNDLLEKIKEKMPTKDWTTMLQNYIHPTKQTKVKKILVIVSEGELTKDSNAHSRIGEYADFGTKGTKHQFKHSKGHKGQILYYNEKGIIKVLPIYANQKDSDVKSYIEQNGCKLYKKGMKFYSGCLIQINKDFEATAYYTQTDENGNDKPIPTKEKLQAGVYKLRTMTEAGQIKLESSTGIELLTSAKVLAEADFSKFSRY

SEQ ID NO: 9082 - protein, 1028 aa, synthetic construct
  REGION 1..1028: note = Synthetic
MNKKVFAFDLGKASIGYCVREDLKILEAGSLIINKDHAECISNRDRRRVQKTLLAHKKRESFFNNLWQNCDLNILNKDDKKFSTEFGKKNDSTIYNSTLLRIALIQNKPLEEWQIYKALHNAIQRRGYDSKLPWANAKSDDDRKNEELSARYTQNEQGEELIQNENFKYPCYYDAVRLSLWSENMPEKLQTYVPLDNVKKIRDAGIVAPRNLVEKELKQLYINAQLQLPQLNKYSVEYFLYGEGEVAYASYNKKDYKCHRGTEWDMQGVLGQKIPRFDNRIIAKCKLLPKRNVCKANTLENVSFVLLMKLKNLRYTNINNEYSMLSADTINKIYQNWLNKALKDDGSYKLDTTIIQKEVEKVLGEKIQDKFEPLKANISGRSSFCRRACKIMNHIILNGIEDPSTMDVAEFTDNIDTPNGITEAEIRTMLSKIGTWENLYIPDNRYEMAELSSDNREKTDILIGNITNPIVRNRLQVFRDKLIELKQKYETPDKIIFEFIRDGADNSLYGAKKAQDFLKTIKENEKTNNDLAIELKNADCFSVVNLEKLKLLKQQDGICIYCGQRIGISDLDKCEIDHIYPRSRGGNDAISNKVLCYSIENQKKKDRTPYEWLHNDERTWADFVNRAKLLKDKLKKTKYTLLTSNPENCKELIKSYNGLAETAQIARVAQDITAFIFGWGLQLKDEKRRIFVNNGASTSGIRKTYRLNKLLGNDVKKNRSNDKHHALDAICISFSQNYKYNKYTKRDEIEGLDIHDNEFRELIKQTLDAIIPYPYTNDKPFKGNTKPLETIYGYRCIDNKHCITQRVSIETIEQKDKKIKCIVDEVIKNDLLEKIKEKMPTKDWTTMLQNYIHPTKQTKVKKILVIVSEGELTKDSNAHSRIGEYADFGTKGTKHQFKHSKGHKGQILYYNEKGVIKVLPIYANQKDSDVKSYIEQNGCKLYKKGMKFYSGCLIQINKDFEATAYYTQTDKNGNDKRIPTKEKLQAGVYKLRTMTEAGQIKLESSTGIELLTSATVLVEADFSKFSKY

SEQ ID NO: 9083 - protein, 1027 aa, synthetic construct
  REGION 1..1027: note = Synthetic
MVKKVFAFDMGKASIGYCAREGLKVLELGSLIIDKDHAEIVSNRDRKRVFKTLQAHKAREKFFNDLWKFCNLEPLQKESELFKKEFGKKQDKTIYNSTLLRIALLQNIELEEWQIYKALHSTIQRRGYDANLAWANANSDDEKENKKRILEYTTDTNNNELITNDEYKYPCYYDAKRLGLWNENNPNELKTYVPAEMSEKVRTAGIVAPREMVEKELRQLYLNAQKQLPELKKYSADYFLYGISEKAYASYLDNDYKKYRGTNWEWESGGVLGQKIPRFDNRIIAKCKLLPKRNVCKAETLENVSLVLLMKLKNLRFTDVLGEKSMLSADAIKQIYENWQKKATKNDGSIKLDTTITKQEIEKVIEEKILEKIEPMKAKLSGRSSFCRRACQIMCKIILEGIENPATMDIAEFIDNIDTKNGITEEEIRTMLSKVGKWDNLYIPDNRYEMAEMASDEREKTDILIGNITNAIVRNRLQIFRDKILELKHKHGIPDEVIFEFVRDDNSLFGTKKVQAHIKTIKDNEDLNNKLAQQLKDADCFSAINLEKMKLLERQGGICIYSGQKIGISDLDKCEIDHIYPRSKGGNDAISNKVLCYAIENQKKKGQTPYEWLHNNEELWNELVTRVTRLQGTLGKTKVALLTSKPEECQELVKSYNGLAETAQIARVAQDITAFIFGWGLQLEGEKRRIFVNNGATTSAIRKTYRLNKLLGNDVKKNRQNDKHHALDAICISFSRAYKYNAITKRDEIEGLDIHDNEFKDLVKKSIDDLLPYPYTNDKPFKGNLRPLETIYGYRKIGYKNFITQRIDITSIEQKDKKIKSIIDEVIKNDLLNKLEDKMSSKDWSKMLSNYIHPTKMTKVKKVLVVVSEGDMSFDENGRARIGEYADFGTKGTKHQFKHSKGHKGQILYYNEKNVIKVMPIFANQKLDEVKEKLEQINCKLYKKGMMFYSGCLIKVDKEFEGTAYYTTTDENGKEKQITNKETLPAGVYKLRTISEAGQAKLESPTGTEILTSAKNLTNSEFKKLTK

SEQ ID NO: 9084 - protein, 1028 aa, synthetic construct
  REGION 1..1028: note = Synthetic
MKDKVFAFDMGKASIGYCVRDGLNVLELGSLIIDKDHAEIVSNRDRRRVYKTLNAHKAREDFFNDLWRFCNLEPLKKDDELFKKEFGKKNDETIYNSTLLRVALLQNLELEEWQIYKALHSAIQRRGYDTKLAWANVNSDDEKKNLEQTLKYTTDDDNNELIINEEYRYPCYYDAKRLGLWREENPTEFKTFISTDNIVKIRTSGIVAPRNMVEKELRQLYINAQKQLPELNKYSADYFLYGTSQKAYASYLDNDYKKYRGTNWEWENGGVLGQKVPRFDNRIIAKCKLLPKRNVCKADTLENVSLVLLMKLKNLRFTDSLGEKSMLSAESIKQIYENWQKKSTKDDGSMKLDTTISKTDIEKVIGKGEILEKIEPLKAKLSGRSSFCRRACQIICSIITEGIDNPATMDVTEFIDDVDAKNGITEEEIRVMLSKIGKWDNLYIPDNRYEMAELSSDEREKTDILIGNITNAIVRNRLQIFRDEILELKQKHGIPDKVIFEFVRDDNSLFGAKKTQEYINNINKNQKENDKLAMQLKDVGCFSVVNLEKMKLLEKQGGICLYSGQKIGINDLDKCEIDHIYPRSKGGNDALSNKVLCYAIENQKKKGQTPYEWLHGYEELWNEFVTRVSRHQDSLGKTKVTHLTSKPEDCAKLINSYNGLAETAQIARVAQDITAFVFGWGLQLEGEKRRIYVDNGATTSAIRKTYRLNKLLGDDIKKNRQNDKHHALDAICISFSRDYKYNTTTKRDEIEGLEIHDNEFRDFVKKSLDNLLPYPYSNDKPFKGNTNPLETIYGYRNISGRHFITQRVDITSIEQKDKKIKSIIDEVIKNDLLAKLEDKMSSKDWSNMLSNYIHPTKNTKVKKVLLVVSDGERTLDANGRARIGEYADFGTKGVKHQFKHSKGHKGQILYYNEKDVVKVMPIYANQKLEEVKEKLRQMNCKLYKKGMMFYSGCLIEVGKEFEGTAYYTITDENGKEKQTPSKEILPFGVYKLRTIKGNGVVKIESSVGNEIVTSVKNLVVADFKKLTK

SEQ ID NO: 9085 - protein, 1027 aa, synthetic construct
  REGION 1..1027: note = Synthetic
MVKKIFAFDMGKSSIGYCAREGLKVLELGSLIIDKDHAEIVSNRDRRRVFKTLNAHKAREKFFNDLWKSCNLEPLEKEDKLFKKEFAKKDEETIYNSTLLRIALLQNIELEEWQIYKALHSAIQRRGYDTSLAWANANTDDEKENKKRTLEYTTNKENDELISQEEYKYPCYYDAKRLGLWEEENPKTLKTYVDVYNNDKIRTAGIVAPRNMVEKELKQLYINAQKQLPELNKYSADYFLYGVSEKAYATYLDSDYKKYRGTNWEWENGGVLGQKIPRFDNRIIAKCKLLPKRNVCKAETVENVSLVLLMKLKNLRFTDVLGEKSMLSAEAIKQIYDNWQKKATKNDGSIKLDTTITKQEIEKVIGEKILEKFEPMKAKLSGRSSFCRRACKIMCKIILEGIENPATMDVGEFIDNTDVKNGITEKEIRTMLSKIGTWDNLYIPDNRYEMAEISSDEREKTDILIGNITNAIVRNRLQIFRDKILELKYKYGTPDEVIFEFVRDDNSLFGAKKTQEYISNINKNQKENEEIAQQLKDANCFSSKNLEKLKLLQKQGGHCIYSGRPIAISNLEECEIDHIYPRSRGGNDALSNKVLCYAIENQNKKEQTPYEWLHNNEHSWNEFVKRVTNKQEALGKIKVKLLISKPEDSEKLIKSYNGLAETAQIARVAQDITAFVFGWGLQLEGEKRRIFVNNGATTSAIRKTYRLNKLLGNDVKKNRQNDKHHALDAICISFSRGYKYNATTKRDEIEGLDIHDNEFRDLVKSSIDSLLPYPYSNDKPFKGNIKPLETIYGYRKLGEKTYITQRVDITSIEQKDKKIKSIIDEIIKNDLLAKLEDKMTSKEWANMLSKYVHPTKKTKVKKVLLVVSEGITNFDENGRARIGEFVDFGTKGTKHQFKHSKGHKGQILYYNEKNAIKVMPIYANQKLGEVKDKLEQMNCKLYKKGMMFYSGCLIKVDKEFEGTAYYTIVDENGKEKQTPNKEILPAGIYKLRTLMSDGKVKLESSTGIEIVTSAKKLAEADFKKLTK

SEQ ID NO: 9086 - protein, 1027 aa, synthetic construct
  REGION 1..1027: note = Synthetic
MVKKIFAFDMGKSSIGYCAREGLKVLELGSLIIDKDHAEIVSNRDRRRVFKTLNAHKAREKFFNDLWKSCNLEPLEKEDKLLKKEFGKKDEETIYNSTLLRIALLQNIELEEWQIYKALHSAIQRRGYDASLAWANANTDDEKENKKRTLEYTTNKENDELISQEEYRYPCYYDAKRLGLWEEENPKTLKTYVDVHNNDKIRTAGIVAPRNMVEKELKQLYINAQKQLPELNKYSADYFLYGVSEKAYATCLDSDYKKYRGTNWEWENGGVLGQKIPRFDNRIIAKCKLLPKRNVCKAETVENVSLVLLMKLKNLRFADVLGEKSMLSAEAIKQIYDNWQKKATKNDGSIKLDTTITRQEIEKVIGEKILEKFEPMKAKLSGRSSFCRRACKIMCKIILEGIENPVTMDVGEFIDNIDVKNGITEKEIRTMLSKIGTWDNLYIPDNRYEMAEISSDEREKTDILIGNITNAIVRNRLQIFRDKILELKYKHGTPDEVIFEFVRDDNSLFGAKKTQEYISNINKNQKENEEIAQQLKNANCFSSKNLEKLKLLQKQGGHCIYSGRPIAISNLEECEIDHIYPRSRGGNDALSNKVLCYAIENQNKKEQTPYEWLHNNEQLWNEFVKRVTNKQEALGKIKVKLLISKPEDSEKLINSYNGLAETAQIARVAQDITAFVFGWGLQLEGEKRRIFVNNGATTSAIRKTYRLNKLLGNDVKKNRQNDKHHALDAICISFSRGYKYNATTKRDEIEGLDIHDNEFRDLVKSSIDSLLPYPYSNDKPFKGNIKPLETIYGYRKLGEKTYITQRADITSIEQKDKKIKSIIDEIIKNDLLAKLEDKMTSKEWANMLSKYVHPTKKTRVKKVLLVVSEGITNFDENGRARIGEFVDFGTKGTKHQFKHSKGHKGQILYYNEKNTIKVMPIYANQKLGEVKDKLEQMNCKLYKKGMMFYSGCLIKVDKEFEGTAYYTIADENGKEKQTPNKEILPAGIYKLRTLKSDGRVQLESSVGIEIWTNAKNLVDTDFKKLTK

SEQ ID NO: 9087 - protein, 1027 aa, synthetic construct; identical to SEQ ID NO: 6361
  REGION 1..1027: note = Synthetic

SEQ ID NO: 9088 - protein, 1045 aa, synthetic construct; identical to SEQ ID NO: 6922
  REGION 1..1045: note = Synthetic

SEQ ID NO: 9089 - protein, 1035 aa, synthetic construct
  REGION 1..1035: note = Synthetic
MNNTKNKYTDKFKQFKKGLVYGFDLGTHSLGYAVRKGDVWLEEGVIAFHGTPETLDQRRSHRTARRRNQRRKQRLNWLKDQLVKMNFIDKNHEPGSKASPVKEHPATLRYRALQGEKLSGEELHTALHHLFKKRGFKFDVPWANQQLSSGDDEKEVREQWKETREQLDEYDSDYIGEYLHKLWEKTLECQKEGKPEPRMIDHNFPRDLIEEEYRQIVKQQKQYYPVFEETTPEASEERTWEDWIIYGDCELVKEHDGPEVAVYDRLSEQNRGMLALRYAHFNNRNVGRDQYQPFDENGRPLHRVSRDRDEYREFQFGEAITNFRVRNEDGKTVDPPAEIIKAIREHYETKKDNQKPQITVNRLQKIIDKYNEEYGSDYSLIDGQTRLTPGPMSGRSRFSTPTLKKFDQEYAKKGKRPPVNQQPLLRYPEESIEDACERWLRDMAFPLGEHRLRIYLNLMRRLKKEHSAPDYVVMETTRDLAVGKKTASKIIRQREEKEKKRDKAFNFWQEAGFEHPSRNQIALFRLWEQTEGQCIYCGETISQDELINDKAELEHIVPRSTIVCDELFNRVVAHSSCNADKAGNNPYEAFFNSENEKYNWDEIVQRTGNFFREGSLKYKLIVLPPDETENILRDKFQAPLTKTGYIVQMARTLTIIEMDWLNEEGRDPSSEGADHDGRRYMTTTGGTTYMLRKHWGLKYVLHDHHEDLEKEADIENLESEANEDRRHLKARFDLRNHALDAMVIACTYPPMARMRSSKQHKKKSPDGYWAREDGKLTAMSDLFYIGYDAVREMIPDIEVTHYVPNQLNASHAEQTFLGKRTFEDEETEKEKTWFIKRKSLRDLVSTSSGKLKKNINTSYTPIYPPELGSYLEIALEKYREEDNPTPEGFVNQLCFSTFQSWRDKGADPDQFSFPCEVKIPIKKVRVRAYKGGKRPVIKVQPHAYVARDGYKGIAIYETPEGEREAIMVPYWENDPKYQEEKAKIPSGSRQVYFLPTHGTLKLEQEYLQEKGWVEFGDKYRLQSYDNQGHGFLVPI

SEQ ID NO: 9090 - protein, 979 aa, synthetic construct
  REGION 1..979: note = Synthetic
RQMRRRTAARKYRRDWLKQQLEKHGFTLPNNTDKFEHPVILRNNAVRGQKLDSAELHIALQHLFKKRGYEYEVPWANVQEDIKGKKDEEITGEKVTAERLEKEGFDYPCEKLFNILQKMAKLKKEGTPEDRIIGFNFERKLIEKEYRRIIETQKKYYPQFDNIVETSKDKITLEDWLLYGNCQIIKVGVNKIPVYDKKTEKDRGVLGIRFAHIYNRALGLDIDSPLDDEGRVLHRIKKSKDIYKRFQFEVAIRNFRVIDAKGNKVIPPKEILEKIREEFNKSKNKQGRNLSVSKLEKILKGTEYKLVEGQNDLNAKSPGDRSSFSSVTLKKWAEITRQGSVPYDNPQPLLRRGGENWETASKRYLNDMAFPLGKHRLEYYIRLLDGLIKKYGNPEFVVIETIRELTLGDKARKEIIKKQADNKLLRDKARDFWAEAGIANPGNPRIRLKRLVEENGWHCPYCQKKIEESEVINDEIELEHIVPQSEVVCNEIFNLTAAHRNCNKKKGEMTPYEAFAHTDKWSYIFKHAQDHYMRKTPKRIETTLKFRLFTEPNARELLRDKYNSPLTQTAYITKAARALSLIRMNWLTADGREPTIEKGNPASMKFMSTNGATTALLRRNWGINDVLWDLYPESDANIKSKKVRLDVRNHAIDAMVIACTFPPVARFMSSSQAEGYWIQDKDGKPQAINSFDINYDTVKNELDKIKVIPYVPNKRHASHYDSTLLGKRKIIISSKTKQKEEVRFYKRVPVVGSHLKEKQIENGDIYPQALGEYIKTAWRKFKSENENCVFEKTKEQFFNKLCFSHFQRWRALGENMEVENFKWPVKVKIPIRNVRIQSQKNEDAVMEIRPKTYVARTGYKGLAIYKTLEGKRIGIYVPYWKTDAIYEQECKKIPKDSKLLIVLRTNMAIKLKKAITDKKNWAWEEFKIVGLGGPRKNPQINLMPLIFIAKGNEIELVLGAERTSNLKITLNDLLDNLLI

SEQ ID NO: 9091 - protein, 1042 aa, synthetic construct
  REGION 1..1042: note = Synthetic
MKTNIGHPFSGGSFKAFKQGIVFGFDMGTNSLGFAVRQNKNWLETGVVTFLDKVGNLEKRRAYRQMRRRTAARKYRRDWLKQQLEKHGFTLPNNTDKFEHPVILRNNAVRGQKLDSAELHIALQHLFKKRGYEYEVPWANVQEDIKGKKDEEITGEKVTAERLEKEGFDYPCEKLFNILQKMAKLKKEGTPEDRIIGFNFERKLIEKEYRRIIETQKKYYPQFDNIVETSKDKITLEDWLLYGNCQIIKVGVNKIPVYDKKTEKDRGVLGIRFAHIYNRALGLDIDSPLDDEGRVLHRIKKSKDIYKRFQFEVAIRNFRVIDAKGNKVIPPKEILEKIREEFNKSKNKQGRNLSVSKLEKILKGTEYKLVEGQNDLNAKSPGDRSSFSSVTLKKWAEITRQGSVPYDNPQPLLRRGGENWETASKRYLNDMAFPLGKHRLEYYIRLLDGLIKKYGNPEFVVIETIRELTLGDKARKEIIKKQADNKLLRDKARDFWAEAGIANPGNPRIRLKRLVEENGWHCPYCQKKIEESEVINDEIELEHIVPQSEVVCNEIFNLTAAHRNCNKKKGEMTPYEAFAHTDKWSYIFKHAQDHYMRKTPKRIETTLKFRLFTEPNARELLRDKYNSPLTQTAYITKAARALSLIRMNWLTADGREPTIEKGNPASMKFMSTNGPTTALLRRNWGINDVLWDLYPESDANIKSKKVRLDVRNHAIDAMVIACTFPPVARFMSSSQAEGYWIQDKDGKPQAINSFDINYDTVKNELDKIKVIPYVPNKRHASHYDSTLLGKRKIIISSKTKQKEEVRFYKRVPVVGSHLKEKQIENGDIYPQALGEYIKTAWRKFKSENENCVFEKTKEQFFNKLCFSHFQRWRALGENMEVENFKWPVKVKIPIRNVRIQSQKNEDAVMEIRPKTYVARTGYKGLAIYKTLEGKRIGIYVPYWKTDAIYEQECKKIPKDSKLLIVLRTNMAIKLKKAITDKKNWAWEEFKIVGLGGPRKNPQINLMPLIFIAKGNEIELVLGAEHTSNLKITLNDLLDNLLI

SEQ ID NO: 9092 - protein, 999 aa, synthetic construct
  REGION 1..999: note = Synthetic
ETGVVTFLDKVGDLKQRRVYRQMRRRTAARKYRRDWLKQQLEKHGFTLPNNTDKFEHPVILRNNAVRGQKLDSAELHIALQHLFKKRGYEYEVPWANVQEDIKGKKDEEITGEKVTAERLEKEGFDYPCEKLFNILQKMAKLKKEGTPEDRIIGFNFERKLIEKEYRRIIETQKKYYPQFDNIVETSKDKITLEDWLLYGNCQIIKVGVNKIPVYDKKTEKDRGVLGIRFAHIYNRALGLDIDSPLDDEGRVLHRIKKSKDIYKRFQFEVAIRNFRVIDAKGNKVIPPKEILEKIREEFNKSKNKQGRNLSVSKLEKILKGTEYKLVEGQNDLNAKSPGDRSSFSSVTLKKWAEITRQGSVPYDNPQPLLRRGGENWETASKRYLNDMAFPLGKHRLEYYIRLLDGLIKKYGNPEFVVIETIRELTLGDKARKEIIKKQADNKLLRDKARDFWAEAGIANPGNPRIRLKRLVEENGWHCPYCQKKIEESEVINDEIELEHIVPQSEVVCNEIFNLTAAHRNCNKKKGEMTPYEAFAHTDKWSYIFKHAQDHYMRKTPKRIETTLKFRLFTEPNARELLRDKYNSPLTQTAYITKAARALSLIRMNWLTADGREPTIEKGNPASMKFMSTNGPTTALLRRNWGINDVLWDLYPESDANIKSKKVRLDVRNHAIDAMVIACTFPPVARFMSSSQAEGYWIQDKDGKPQAINSFDINYDTVKNELDKIKVIPYVPNKRHASHYDSTLLGKRKIIISSKTKQKEEVRFYKRVPVVGSHLKEKQIENGDIYPQALGEYIKTAWRKFKSENENCVFEKTKEQFFNKLCFSHFQRWRALGENMEVENFKWPVKVKIPIRNVRIQSQKNEDAVMEIRPKTYVARTGYKGLAIYKTLEGKRIGIYVPYWKTDAIYEQECKKIPKDSKLLIVLRTNMAIKLKKAITDKKNWAWEEFKIVGLGGPRKNPQINLMPLIFIAKGNEIELVLGAEHTSNLKITLNDLLDNLLI

SEQ ID NO: 9093 - protein, 996 aa, synthetic construct
  REGION 1..996: note = Synthetic
MKGLNENFLNGLVFGFDLGTGSIGYSVRRKTEWIDVGVILCSENTNNLKDRNKNRRMRRTLRSRKQRLLRLKTKLISIGLPSPQNFIDDPVKLRLKAVKGEEVSPEELHCAIFHLLRRRGYQDVPWKSSDKDKEAGEIRDKVNALSNELKERGFRFPCEWLAAVSHNQRRREQHWERNLIIDEFNEIVEKQKERYPNLFEKRDEILYGDTHRYEKNGKQFSVFFKSTESKDSGVFSMHWPRFDNRSPSLDIWKPIDDEGRLLHVARTNNNTYKEFQFEASIINFRVLNSKTRIKIENTPPELIEMIREIWLKPRGKKEGSGMKVSISDLKKIIEKWNKTHPDTELSLIEGQTDLTPISDKGRARYSTPTLRSIRDTLQGGDRVNPPQPILKRKNESTTDAVNRMIAEIPNPLVSDRLSKLLKLLNGLVSKFGKPDLVIVEAVRDIGLGKKNKKKLIKIRDERAKERVDAREDGASSKKEIQRYLLFKELDGVCPYCRRVKISSDILNSDFEVEHIVPYRRSFCNEIFNLTLACRKCNKEKGNRTPYEAWHNTERWIEIEESAKHFSEKGKRLKADLLISPNAEELVESRRALAETSYIARSARGLILTRLEMLTDEGRDPSDQKGYVPYAVTSGALTSGLRHNWGLNAALNFDEPDPDKKLLKNRGDARHHALDAMVIASTLPWAANSSKEKGGWRNIDEFGNELIENPIELTLKTAREQMKKIIPENWDPVGYNSKHYKTTLLSMKKVINDKRETEEWFVSRELLSSLRPKDTKKIYPKELGTYISTAWKFFEKEGGKTGKGDLFPKEFVDSLCFSHFQRWRSKGMPEFSWPEKIKIPIKTVRYFSVKDPDAVLPLKRNADNGPFVKREDFREAWILLKEDGTFDKVIHVPHYRKDPLYPKMKRPNSAIVIQKGQNVILKSSPYPNSPAGAWRVMIIGKIIVKLIPAVLAQNFKSKDEESKTYKLFGMPESGWKATWNNFFKHLELSNYIKSPSE

SEQ ID NO: 9094 - protein, 1102 aa, synthetic construct
  REGION 1..1102: note = Synthetic
MNPNKSTYQNFIDGKVFGFDLGTGSIARCVRVGKELIDVDDLIFDSQTYKLEDRRKNRRPRRSIRNRDSRREDFADELEKIGLPAAFSISSDGNAFVKVGCEGVNNPIKLRCQALKGRPIKAQLLHAALSHLFKRRGKIQLPWEKETDKAKKKPEKEEWGKGTIPPERVSKEFEKTKAKYAHPATYLRAIEVQWHWDRRKALRAGNPLESILGKPQQRRRVWPSTYLEAEFRAIVEAQKSNFPALAKNADWLLYGETNEIKGHGATSHVFFKTEADKYRGVYGLRYARFNNRNPGLDAFEPVDEEGRPLHVVGKDSDAFRHAQLAVALLNFRVQDPKTRRKIKVEDNPEWLTKLIEMARDAAGEKNEDAEETAIPKSVLKKWEKHFAGKFQLRDGQTALTARASGGRARFSSKTLKLISELVGKGKPLPLLAPVLRRKNEKDNLEALNRYLMEIRNPLVRHRLTQFARLFKAMLENPKIGRPDFIVVEAIRSLAMSDNEKSKHSALQSHREGENDKAFAFWRGAGISSPGNRRIQAHKLWIETDKTCPYCLQPTDLLRLQLEDEDSQETDTKNAVEIEHIVPKSKIVCNEFYNLTLAHRDCNNVKRDQTPFGAFSKHNDPNRPTWNELSKKWHQWFTKTISITYDYRIKGMGKPIKKSEEIMVSKGKLDLFMSEDAISLVNSKGDISQTSYITKLVRQICCLLMDSPEDPWLTKDGRDPKYETGNNPQTRYQITNGTVTDALRRQWGIGKKNRGDYRHHAEDAVIVACTYPPLARCLYDEVQKADERGWWKYDIKTRRQLVENPIFGENEKMRQAVKKKLEKLIVRHHVQRKRRGNKLKTTLLSKRNYNGREVFVARKRLEDLTANDFDKIVSSHLRDYLKEAWAEWQTDQPSVSQDAEPTEAEDDGEDTETKKPKAKKLPKDFIVSLRDPIWKTPIKSVKYIQEQSRASVMKIREYAENKQGRHEIFVAYSENQEVRLYEEKSGTGFIAVPVRPCYPKGNGPAVPQAAGKLKLTIRRNDLFSIKSNVKIGRKEIEPGVYRVLMLPGEADLRIRFLPHYQHANPPKGGKVTPLRTDVCKLAPFIEMLPKNLNELPHPPSVKP

SEQ ID NO: 9095 - protein, 1022 aa, synthetic construct; identical to SEQ ID NO: 8250
  REGION 1..1022: note = Synthetic

SEQ ID NO: 9096 - protein, 1022 aa, synthetic construct
  REGION 1..1022: note = Synthetic
MRITYNDFVKGLVFGFDMGTASIGWAVRHGNRFIDTGVLICPEETNDLSARRTLRRQRRTIRNKRFRRRWLKKELAKIGLPFPANALKEHPVESRCRAVAGGCLSPEQLHAALSHLWKRRGYSEVPWADDADREEDREAKEEKGVIKKAMGSLKKEMDEAGCCHPCQLLAHRMKEGKKQRKEYWPRDLLIEEHRAICDAQKGNYPKLHAKMDWLLYGDLSKKVEEFRVYDSLDEGRNPGVVGLRWPRFENRNPALDALAPLDERGLPRHVVRKNKQAYLDAQWELALMNFRVIDIQTRKIVDPIQAHPKFIAELQKEWEAKGKVTLARLKRLAAPYAEQFVLDENQKPLTPQISSGRARYSSPTLESIREAIAKGHRVDPPQPVLQRKGETRTKALHRYLREIRHPLVRHRLILLQRLLVKLEKEYGIPDLVVMEAVRSLALSSKRKRELNKRNEEHRQNREQAVTALKTEKQSTSKNSIQRYRLWKEVKGLCPFCKQPIIQRDLYSGAADIEHMVPRHRVDSSEWVNLTVGHLKCNREIKADRTPHEAFASSTLWPSLKKHAEDCFRGRKLEIFLSPNAEELLENKADLQHTAYIARVARHVTLLQFNWLGKDGRDPTPEKQNPALSFQVTNGQLTSRLRRAWGLNQILHPITDGRRWDDLTEAEQEQFKQKNRGDHRHHALDAMVIACTLPWFAHRSVRAKDRSTGEDGWWDLDETTQRSIAINPVFPREGEMRRVAEAQMEKLVVQHHTSRSNHRQAYYTTLYGRKGGNTYVAREPLGKRTPKNLNNIYPTELADYCQAAWLRYEDESPDIATELKKAKRAKRGLPAAFEAKLCFSNFQRWRKQAKRGESHFDWPKEIKIPIRNVKVIGVHDDTAVAPAAPGTHAFVKRGVFKEVRIYPSPDGKTWVPLFIPYGKHDQPVAGEEWDATAKPVKIIRRGDTINLKNGSGPSNPPGLYRVASTMQKQIQLLPVNLADTKEALLASGFLANGANIRWQTFFTAMAHELPHPPSAQPSVTGSD

SEQ ID NO: 9097 - protein, 1028 aa, synthetic construct
  REGION 1..1028: note = Synthetic
VEKLHSNYERFLGGRVFGLDVGTASIGHAVREARDFREAASLICAADTGDLKNRNKLRRQRRTLRNRNYRRKWFARELAQILGLTLPATLPDHPVFLRCQAVEGKRLSSLELFTALVHLFKRRGYSDVPWANASSSELDPDKEKEHGVIRDAITKLEKEMQDKGCAFPCRLLALRQKEAGASPTEKWGRALYWPRELLEKEFRAILDAQKTTYPLLQEKADWLLFGDTKPYQHNGQVFHVFHKATEGRNPGILGLRWARFDNRDPNLDMFCPYDEQGRPQHVVRKKAEAFKSAQWELAVLNFRVLDLATGAKVRPDPASLVRLKEIYDSRHHKKKPSDIKISTALLEKWAAEFSAKYQLLEGQKELVAASSAGRARFSSPTLLTLGRAGSPTNPQPLLRRPGESAEEALNRYLREIRHPLVRHRLLLYSNLLKRLVKKYGEPDFVVVEAARSLAEGRKARLERDKRDRANQQERDDARRNLSESHQSTSRQALLRYRLWKETEGICPFCLKPIPRASLFTEADIEHLVPRSRVDCNEFYNLTVAHITCNREIKKHKTPYEAFSPLPAWELIESNARKCFKGRKLELFLSPDAESKIEEKADLQHTAYIARTVRHVTLIQLNWLGEDGRDPVIEKQSPSLRFQVTNGQLTSRLRQAWGLNQILHPLPSREQWDAMTPEQQQKSREETAKKNRGDLRHHALDAMVIASTLPWLAHRTHGATDENGHHGWWTQDEKMRSKAVNPVGLDYLTAKRLIESAEVRPHVSRSQHRQAYHTTLYARKGPDTYVAREVFTDLKPKDLEELYPRTFSHYCRAAWNRYEEEADDIAKELKATKGFLPDTFTQKLCFSHFQHWRATNETEFFWPKRIKIPIRSVRLISVKDAKAVMPASSGTLAYVKRKGFKEVHIHLSADGKQYVPVFVPWWKSDKKFSNYDGTVNDAIVRIIRAGDVVETVKPFSSGYGPAKYRVLSTEQQQVPLVPYYLAKTEEALTAAGLPKSGLRPYWPDFLHALGYELPHPPSPQSGSAGPAEA

SEQ ID NO: 9098 - protein, 1022 aa, synthetic construct
  REGION 1..1022: note = Synthetic
VKNLESNYQQFLNGTAFGIDLGTASIGYAVRKKRDFPRVGSLLCSEAINDLSKRRELRRQRRTLRNRTYRRKWFARELSQLLGLIQPTNLPDDPISLRCRAVQGDEMTPLELFTGLVHLFKRRGYAKVPWASSETRKTDPNKQKEEGFIQSAISELEREMESTRCTYPCQLLSRRREEKGTSPQDHWARKIYWPRDLLEKEFRAILETQKSRYSQLFEKADWLLFGNTEERRGFHVFFKATEGRNPGILGLRWPRFDNRSPGLDALRPVDELGRPLHVVRRNKKAFLDAQWQVALQNFRVIEIATGAKLRPDAASLERLKQLYDLKKKSASIKIPVKLLETWEKEHATKYKLIEGQTDLTPGGSGGRARYSTPTLLTLGEDGAPTNAQPILRRSGESKEAALDRYLREIRHPLVRHRLILFRQLLAKLVKDHGEPDFMIVEAARSLADSKEQRLARVKRNREFQQDREDAVDKLTHFDHSTSRKAILRYRLWKEIGSTCPFCLEKNIEVSNLFSTADIEHLVPQSRVDCNEFYNLTIAHAKCNRELKGNKTPYEAFHDKPNWPAIQENARQCFKGKKLELFLSPEAESKIEEKADLQHTAYIARAARHVALIQLGWLGEDGRDPTPEKQNPALRFQVTTGQLTHRLRQAWGLNQILHPLPAREVWDAMTPEQQQEERDKAAQKNRGDLRHHALDAAVIASTLPWLAHRTHGAVDENGNHGWWTQDEKMRSKAANPVGLDFLTVKRLMEAADIKQHVSRSLHQQAYNTTLYAKKGKDCYAAREVFTSLTPKNLEDIYPETFREYCRAAWNRYKEEAVDLDEELKNSKKCLPAAFTVKLCFSHFQKWRANEAPEFTWPREIKIPIRNVRLISVKDDKAVTRASLGTHGYVKRTSFKEVRIHRSADGKALVPVFVPFWGKDQPFFDHEGDLDPTPLRVVRRGMIVQTVKPFSNGQPAGKYRILVTGQVQLRLVPHHLADTEEACLAIGLPKKGLQPYWPDFIRALGYELPHPTSAQPQSSDSGQA

SEQ ID NO: 9099 - protein, 899 aa, synthetic construct
  REGION 1..899: note = Synthetic
LKYLESNYQQFLNGTAFGIDLGTASIGYAVRKKRDFPQVGSLLCSEAINDLSKRRELRRQRRTLRNRTYRRKWFARELSQLLGLIQPTNLPDDPISLRCRAVQGDEMTSLELLTGLVHLFKRRGYAKVPWASGETRKTDPDKKKEEGFIQSALSALEREMESTHCTYPCQLLSHRREEKGTSPQDHWARKIYWPRDLLEKEFRAIIEAQKSRYPQLCEKADWLLFGNTEERRGFHVFFKSTEGRNPGILGLRWPRFDNRSPGLDALRPVDELGRPLHVVRRNKKAFLDAQWQVALQNFRVIEIATGAKLRPDALSLARLKQLYDLKKKSVSIKIPVKLLETWEKEHATKYKLIEGQTDLTPGGSGGRARYSTPTLLTLGEDGAPTNAQPILRRSGESKEAALDRYLREIRHPLVRHRLILFRQLLAKLVKDHGEPDFMIVEAARSLADSKEQRLARVKRNREFQQDREDAVDKLTHFDHSTSRKAILRYRLWKEIGSTCPFCLEKNIEVSNLFSTADIEHLVPQSRVDCNEFYNLTIAHAKCNRELKGNRTPYEAFHDKPNWPAIQENARQCFKGKKLELFLSPEAETKIEEKADLQHTAYIARAARHVALIQLGWLGEDGRDPTPEKQNPALRFQVTTGQLTHRLRQAWGLNQILHPLPARETWDAMTQEQQQEEKDKAAQKNRGDLRHHALDAAVIASTLPWLAHRTHGAVDENGNHGWWTQDEKMRSKAANPVGLDFLTVKRLMEAADIKQHVSRSPHQQAYNTTLYAKKGQDCYVAREVFTSLTPKNLEDIYPETFREYCRAAWNRYKEEAVDLDKELKASKKCLPSAFTAKLCFSHFQKWRANDAPEFTWPREIKIPIRNVRLISVKDDKAVMCASLGTHGYVKRTSFKEVRIH

SEQ ID NO: 9100 - protein, 1022 aa, synthetic construct; identical to SEQ ID NO: 8251
  REGION 1..1022: note = Synthetic

SEQ ID NO: 9101 - protein, 1022 aa, synthetic construct
  REGION 1..1022: note = Synthetic
LKYLESNYQQFLNGTAFGIDLGTASIGYAVRKKRDFPQVGSLLCSEAINDLSKRRELRRQRRTLRNRNYRRKWFARELSQLLGLIQPINLPDDPISLRCRAVLGDEMTSLELFTGLVHLFKRRGYAKVPWASGETRKTDPDKKKEEGFIQSAISELEQEMESTRSTYPCQLLSQRREEKGTSPQDHWARKIYWPRDLLEKEFRATLEAQKSRYPQLCEKTDWLLFGNTKERRGFHVFFKATEGRNPGILGLRWPRFDNRSPGLDALRPVDDLGRPLHVVRRKAQAFVDAQWQVALQNFRVIEIATGAKLRPDAISLARLKQLYDLKKKSVSIKIPVKLLETWEKEHASKYKLIEGQTDLTPGGSGGRARFSTPTLLTLGQDDTPTNAQPILRRAGESKEAALDRYLREIRHPLVRHRLILFRQLLAKLVKDHGEPDFMIVEAARSLADSKEQRLARVKRNREFQQDREDAVDKLTHFDHSTSRKAILRYRLWKEIGSTCPFCLEKNIEVSNLFSTADIEHLVPQSRVDCNEFYNLTIAHAKCNRELKGNRTPYEAFHDKPNWPAIQENARQCFKGKKLELFLSPEAETKIEEKADLQHTAYIARAARHVALIQLGWLGEDGRDPTPEKQNPALRFQVTTGQLTHRLRQAWGLNQILHPLPAREAWDAMTPEQQQEEKDKTAQKNRGDLRHHALDAAVIASTLPWLAHRTHGAVDQNGNHGWWTQDEKMRSKAANPVGLDFLTVKRLMEAADIKQHVSRSPHQQAYNTTLYAKKGQDCYAAREVFTSLTPKNLEDIYPETFREYCRAAWNRYKEEAVDLDKELKASKKCLPSAFTAKLCFSHFQKWRANDAPEFTWPREIKIPIRNVRLISVKDDKAVMCASLGTHGYVKRTSFKEVRIHRSADGKALVPVFVPFWRKDQPFSDYEGDLNPTPLRVIRRGMIVQTIKPFSNGQPAGKYRILVTGQVQLRLVPHHLADTEEACLAIGLPKKGLQPYWPDFIRALGYELPHTPPAQPQSSDSGQA

SEQ ID NO: 9102 - protein, 1003 aa, synthetic construct
  REGION 1..1003: note = Synthetic
MNVTSDANAAFLSGLVFGFDVGTGSIGYAVRRGREFRDVGVIICPEDTSDLKGRRGLRRQRRTLRSKKHRRQWLTQELAKLGLAKPSANLDDPVILRARAVSGGALTPEELHAAITHLWRRRGYLERVPWSSREEGDDRKKEEGVVREGISKLRAEMQAEGCAHPCHFLIRHPQDQRRRVWPRDLLEAEFAAIVAAQRDRYPKLGERADWLLYGDTRPVRGEHVYFKSTDGRNPGVLGLRWPRFDNRGPALDSWQPLDAHGRPLHVVRKNKAAFAKAQWELALMNFRVIDTHTRQKRDPRIDFPDFIAALRKEWDKKGKVTEARLKTLAAPYSERFLLIEDQKPLTPDGGSGRARYSTQTLELLRKEVGSGRRVDPPQPVLQRRGDSWERALDRYIAEVKHPLVRHRLLLFRRLLNQLIAKHGAPDLIVVEAVRSLGLSQKNKNELNKRNEEFRKDRENARNILKDAGQSVSANAIQKYRLWREAKGRCPFCLEAISQTALFSGEADIEHLVPRARVDCNEIYNLTVGHIHCNRNEKGDRTPFDAFSHSAKWETMKDNAADCFKGKKLEIFRSPNAEELIEQKTELVQTSYIAKVLRHLCLLRLGWLSDDGRDPTDIKKAPSQRFQVTNGQVTSRLRQSWGLNEVLYPKPGEGDEEAWKQFTEKNRGDLRHHALDAMVICCTLPWLAHLTHGARDEFGNFGWWRQDEKGRSIASNPIGLDYERAKAVIGLVVVRHHVSRSNHQQAYATTLYAKKGENVYVAREVFTTLTPKNLASIYPKDFSAYCEAAWECYRTGSTDIDAELKKTKGSLPEGFTSKLCFAHFQQWRTNGAPEFAWPKEVKIPIRSVRLISVKDDSAVMPFSKGTHAYVKRTGFKEVRIHLTADGKDFVPVFVPFWKGDAPFHSSPAPLSPRVVGVVRKGQVVRLRKALAAGTQPGAFRVLVLGQNQVNILPHHTANKEEARLAMGLPKTGIKPYWPEFIRALGYELPHPPSAQSESTGAAEA

SEQ ID NO: 9103 - protein, 1006 aa, synthetic construct
  REGION 1..1006: note = Synthetic
MLSPILQGDLTMPTTRTAPASVNDAFLNGTVFGFDIGTASIGYAVRHGKKFLDVGVWICPEEIADLKGRRGLRRQRRTLRSKKYRRQWLATELEKLGLPKPRQPLHNPIALRCKAINGEKLSAEELHTAISHLWKRRGYLDHVPWSSREENDDRKKEEGVIKESISELRDEMKSDGCELPCQFLAKHPEQQRRRVWPRDLLKAEFAAIIKHNPKLAAKADWLLYGDTREVRGHRVYFKSTEGRNPGVLGLRWPRFDNRGPSLDSWQPLDAQGRPLHVVRKNKQHFKMSQWELALMNFRVLDAHTRQKRDPRVDFPDFIATLRAEWEKKGKVTQARLIRLSAPYAERFLLIPDQKPLTPDGGNGRAQYSSLTLELLRKEIGSGRRVDPPQPVLKRKGEDAERALNRYLAEIKHPLVRHRLVLFRRLLNKLIAEHGAPDLIVVEAVRSLALSQKNKNELNKRNEAHRRERENARDLLKGENLPTSANAIQKYRLWKETKGRCPFCLQAISQEALFNGEADIEHLVPRARLDCNEIYNLTIGHTDCNRNKKGDRTPYDAFHHDGLWESLKRNAQECFSGKKLEIFLSPNAEELIEQKSELVQTSYIAKVLRHLCLIRLGWVGEDGRDPTTEKCTPSQRFQVTNGQITSRLRQSWGLNHVLYDKPAEDTEEAWQQYAEKNRGDLRHHALDAMVISCTLPWLANRTHGAKDEFGNFGWWTQDEKRRSIASNPIGLDYKKAKAEIEKVVVKHHASRSNHRQAYATTLYAKEAPNTYVAREVFTSLKPKDLDSIYPKSFANYCVFAWQRYELETPDLQAQLKPTKGCLPPSFTQKLCFAHFQSWRAKGEGEFAWPPQVRIPIRNVRLISVKDDSAVAPFSKGTHAYVKRTGFKEVRVHPSKDGARLVPVFVPLWKSDLPISSEPVDLSIKPVVVFRLGNLVQLKKKTGANNPPGKYRIASTMQANVQLIPVHISKDKDALRAAGYLENGVNIRWKAFIEAAGYEPPHPPSAQP

SEQ ID NO: 9104 - protein, 1028 aa, synthetic construct
  REGION 1..1028: note = Synthetic
MQMRLPGNVQSDFINGLVFGFDVGTGSIGYAVRRGKEFLDVGVIICPEETSDLKARRGLRRQRRTLRSKKYRREWLRQELAKLGLPAPKTNLNDPVTLRIKAVNGDKLLPEELHAAIAHLWRRRGYLAHVPWSSHDEGDDRKKEVGEIKESISKLREEMTTDGCELPCHFLAKHPDCQRRRVWPRDLLKAEFDAIAKHHPKLADKADWLLYGDTREYEDNRGQLHHVFYKSTEGRNPGVLGLRWPRFDNRGPALDAWQPMDEAGRPLHVVRKNKDAFKKAQWELALMNFRVLDAHTRQNRDPRTDFPEFVAVLRKEWEKKAAKHETFKLKLEQLAKPYADKFLLIPDQKPLTPDCGAGRAKYSSDTLDSLREAINAGERVDPPQPVLQRRGESPDRALDRYLADIKHPLVRHRLVLLRRLLNQLIKDHGAPDLIVVEAVRSLAMNKRGEKYKKLMRDNEQFRKEREEAREFLHGEGHSTSSTSILRYRLWKEAQPLCPFCREAMTQEQLLRGEVDIEHLVPRARIDCNEIYNLTVGHIHCNRNVKSEQTPYEAFSHDPEKWAALKRNAEKCFHGKKLEIFLSPNAEELIEQKSELVQTSYIAKVLRHLCLIRLGWIDDDGRDPTTNVATPSQRFQVTNGQLTSRLRQSWGLNHALYPEPAEGDEAAWNQYAEKNRGDLRHHALDAMVISCTLPWLAHRTHGAKDEFGNFGWWTQDEKRRSKAANPIGLDYQKAKAEIERVVVHHHVTKASHRKFFDTTLYGKRGDDLYIARKPLSKMKSKQLHKVYPKTLAAYVTAAWTLFERENPDIETLIKDENRGKEVQDKVSLPVKFTSRLCFSHYQRWANKHTLANLLEFAWPSEVKMPIKSVSVVADDGDSAMFETRKGSQSFVSQTEFKEMRVFVHPNGKKYFAEYVRPWARDSHDVHERAPEGAKFVCRLSKGDSFLIKKALTSKKIDIDTRWILKKTFSTGRVSILPAHLSHNKEVLESLGFDSINFVRISLNDLMFALGYELPHPPSAQSESAGAAEA

SEQ ID NO: 9105 - protein, 1044 aa, synthetic construct
  REGION 1..1044: note = Synthetic
MNGSASSGDFLGGLVFGFDVGTGSIGYAVRKGAEFLDVGGLICPEDTNDLSGRRGLRRQRRTLRSRKYRREWFAAELAKLGLPKPAQSPHDPITLRLRGLKGEELKPEELHAALTHLFKRRGYSKVPWANTEARRTEGDAEKEEGKIKDAVAEITKKLGVLHPCQYLVKRRGEVGKSPTENWARKIYWPREVLRDEFLAILKAQENRFPELAKKADWLLYGDAHEVKGHHVFFTASESRNPGVLGLRWPRFDNRGPALDSFQPVDKQGRPLHVVRKNKEAFTKAQWELAVLNFRVIEVATGTLVAPDAKALVRLREMWESCQRKPRKPKKGSVGVPPTVSGVWPSATSDVKVSESLLKKWATEFATRYRLVEGQQPLTPQTGAGRARFASPTLNRLREIIAAGQRPETAQPVLRRAGESADAALNRYLSDIKHPLVRHRLVLFRRLLAELVKRFGPPDLIVLEAVRSLALSEKNKRELQNRIKENRDERASVRNELASRGASTSRNAILRFRLWKETQSTCPFCGDKITQEQLLNGEADIEHLVPRSVVDCSEFYNLTVGHIRCNRELKGNATPIQAFGNTEKWPQLRANAEKCFKGRKLQIFLSDKAEELIEQKADLQHTAYIARVIRHIALLQLGWLNDEGRDPTPDKQNSALRFQVTNGQLTSRLRKAWGLNQILHPLPPGKRWDELTEAEQKQFTEKNRGDLRHHALDAMVIACTLPWLAHRTHGATDEFGNHGWWTQDEKQRSKAANPIFPCEGQMHEVVKREIGKVVVQHHASRSNHQQGYNTTLYAKKDKDAYVVRKPFTSLTVKNLSSIYPKELAAYCEAAWERYAEESTDINAELKKTDKHIPGNFTKKLCFSHFQRWRADSAPAFHWPKTVKIPMKSIRLVAIKDDRAVVPFSKGTRAYVERTGFKEVRIHRSEDGKGFVPVFVPYWKGDAPFSSYPFASDSKPVAVIRKGQVVELKKPLAVGAPGGKYRVLVMGQEQIKILPPHVANKDEAKLAFQLPKSGLQPYWPEFIRCLGYELPHPPSAQSQSSSPAET

SEQ ID NO: 9106 - protein, 1052 aa, synthetic construct
  REGION 1..1052: note = Synthetic
MTPSPFTKKRSPSATSDFFNGLVFGFDVGTGSIGWAVRKADKFLDVGVLICPEDTSDLSGRRGLRRQRRTLRSRKYRRQWFAIQLGLLDLPRPSPGQHHDPITLRLRALAGDSVTRDELHAALVHLFRRRGYTPVPWANTESANAEDDGDKEEGQIKQAVSEITEKMETQGLTYPCQWLDYQRNQAGKSPVKVWGRKIYWPRELLEKEFRAIAAAQSQRFPKLAEKADWLLYGDTRKVKGHHVFFKNSEARNPGALGLRWPRFENRGPALDSLRPLDEQGRPLHVVRKDKQAFLKAQWELAVMNFRVIDRATGGTVAPDAASMTRLRELWESARRKKKKESTDKAGDSNGAVQAVKVSEKLLVKWEKQFASRYKLIEGQQPLVPQTGAGRARYSSPTLAHIQRTISAGGRFDPPQPILRRAGETAQRALDRYLSDIKHPLVRHRLVLFRRLLAQLAARFGEPDTLVLEAVRTLALGETKRREHIQRIKENRDERAGIREDLASRGASTSRNAIMRYRLWKEAQSTCPFCCQKITQEQLLHHEADIEHLVPRSIVDCNEYHNLTVGHLDCNRIRKGDKTPYDAFHHRPEEWELLKVNAEKCFKGRKLEIFLSDKAEDLVEQKADLQHTAYIARVIRHIALIELGWLREDGRDPTGSQDPQKTAWRFQVTNGQLTSRLRKAWGLNQILHPLPAGKRWDDLTDPEQKQMQEKNRGDLRHHALDAMVIACTLPWLAHRTHGATDEQGRHGWWTQDEKQRSKPVNPVFPREGQMHDVAKKEIEKVVVKHHVSRSNHQQAYATTIYGKRDKDTYVAREVFTTLTPKNLSSIWPPDFAAYCEAAWACYADESPDIDAELKKSKGCVTEAFTRRLCFSHFQKWKAAGAQSFDWPASIKIPIRSVKLISVKDDAAVVPFAPGTPGFVKRTGFKEVRIHLAEDGKSFVPVFVPYSKNDSIPSERQVDPNRPPVAIIRRGMVVQTIKPFSAGQPPGKYRVLVTGQNQLRLLPHNIANQEAAILSFGLPRKGLQPYWPDFIKALGHELSHPPSPQPPPARAGEV

SEQ ID NO: 9107 - protein, 847 aa, synthetic construct
  REGION 1..847: note = Synthetic
VWPRDLLEKEFRATAAAQEKLYPKLLEKAAWLLYGGTQEVKDHHVFFNNTAGRDPGVLGLRWPRFENRGPAVDSLRPQDEQGRPLHVVRKDKQAFIAAQWELAVMNFRVIDQVTKAVVAPNAKAMARLREMWESSRRKKKNPSQSAAEPRSVEIKVALLEKWAREFEAQYKLVEGQQPLTPQTGAGRARYSSPTLEMIRTQLANGLRVDPPQPVLQRAGESTESALNRYLAEIKHPVVRHRLVLFRRQLAKLVARFGQPDLIVLEAVRSLALSPAKKRELVQRNKENRDERAHIRGELAGNQQSTSRNAILRYRLWKEARCTCPFCCEKITQEDLFSGAADIEHLVPRALVDCSEFYNLTVGHIRCNREFKGDATPFTAFGQTEKWPQLRDNAEKCFKGRKLEIFLSPQAEELIEQKADLQHTAYIARVIRHLALLQLGWIGKDGRDPTPEKQNSALRFQVTNGQLTSRLRQAWGLNHILHPLPPGTLFHELPPEQQKQFQEKNRGDHRHHALDAIVIACTLPWLAHRTHGATDQWGNHGWWTQDEKQRSKAANPLGLTHEKARALIDQIVVQHHISRSNHQQAYATTIYGKRGPDRYVAREVFTSLTPKNLGSIWPPEFAAYCEAAWGRYCGESQDWESELKYSKGCVPAKFTEKLCFAHFQKWRADGAPAFFWPEKVRIPIRNVKLISVKDDTAVVPFSPGTPGFVKRTGFKEVRVHLAEDGKSFVPVFVPYWKGDRPMLARPIRQGEKPIAVIRRGMVVETKKPFSTGQPPGKYRVLVTGQVQLKLLPHYVANKEDAILSFGLGKKGIQPVWPDFIRALGYELPHSPSPQPQPPGAAETGPVAH

SEQ ID NO: 9108 - protein, 1050 aa, synthetic construct
  REGION 1..1050: note = Synthetic
MNPALLPSADASRAHAFLTGLVFGFDVGTGSLGWAVRQGDKFLDVGVLICPEDTNDLSGRRGLRRQRRTLRSRKYRREWFATELAKLGLPKPPPNAFHDPVSLRNRALAGEPLQPEELHAALAHLFKRRGYTEVPWKTGEAGEENPDRKKELGEIKTKMSQLAGEMRSQDCEFPSQLLARRREKGLPQRKEVWPRELLEKEFRAILRVQAAQHPKLAEKADWLLYGDTGEVKGHHVFFKNSEARNPGVLGLRWPRFDNRGPALDAFTPVDNEGRPLHVVRKNKDAFRLAQWELAVINFRVVDLATGALVSPDKAAIDRLREIWLSLMTPAKRKAVLSGTWTGEVKIELKRKGGKKGVLELWADEYAARYRLVDGQQPLTPQTGAGRARFASPTLHRLRDIIASGQRPDVAQPVLRRDGETAESALNRYLADIKHPLVRHRLILFRRLLADLMRRFGAPDLIVLEAVRSLALSQKNKRELQNRIKANRDERASIREELASRNASTSRKALLRYRLWKEAQSTCPFCGEKISQEQLLSGGADIEHLVPRSVVDCNEFYNLTVGHLRCNRDIKGDRTPYQAFAHTELWPRLRANAEKCFKGRKLEIFLSDKAEELIEQKADLQHTAYIARVIRHVALLQLNWLGEDGRDPTPEKQNPALRFQVTNGQLTSRLRQAWGLNHLLHPLPHGVLFHELPEEQQKQFQEKNRGDLRHHALDATVIACTLPWLAHRTHGATDEFGNHGWWTQDEKQRSKAANPLFPQEGALRRMAEEWMRKVVVRHHVSRSPHQSAYATTIYGKKAPNTYVAREVFTTLTPKNLGSIWPPEFAAYCEAAWARYAEEAADLEAELKRSKGCVPEAFARKLCFAHFQKWRADGTPDFRWPEQVKIPIRSVKLISVKDDTAVASASPGTHGFVKRTGFKEVRIHVAEDGKSFVPVFVPFWKRDKPLCERPIREGEKPVAVIQRGQVVQTKKPTSAGWPPAAYRILVTGQERVKLLPTHVANSEDSIVAFGLPKKALQVTWPDFVSCLGYELPHSPSAQPQPAGPDQAGPVAR

SEQ ID NO: 9109 - protein, 952 aa, synthetic construct
  REGION 1..952: note = Synthetic
MGTSSSDFLNGLVFGFDVGTGSIGWAVRKGDQFLDVGVLTCPEEVAKLDTRRGLRRQRRTLRSKKYRRQWLAAELTKLGLPSPDPAPSDPITLRLRALRGEPLTPEELHAAIAHLFRRRGYAPVPWANREAERAEDSAAKKEEEGIRKALAEIQHEMQATGCRYPAELLAHRRERIGTSPAQPWARKIYWPRDLLKAEFEAIVAAQKEHFPKLAAAADWLLYGDTREVQGHRVFFKNTEARNPGVLGLRWPRFENRGPALDAFTPVDDTGRPLHVVRKNKEAFHLAQWDLAVLNFRVIEVATGARVAPDAQALARLREMWESSRRKPGKKKGSAAAPAAASGASPDAPAVKVSEVLLKKWATEFSARYKLLAGQQPLTPQTGAGRARFASPTLERLREIIASGRRPDVAQPVLRRSGEAAESALNRYLADIKHPLVRHRLVLFRHLLDKLVKRFGQPDLIILEAVRSLALSEKNKRELQNRIKANRDERASIREELASRNASTSRKALLRYRLWKEAQCTCPFCGEKITQEDLLGGGVDIEHLVPRTVVDCNEYYNLTIGHIRCNRDIKGDRTPYQAFGQTELWPRLRDNAEKCFKGRKLEIFLSDKAEELIEQKADLQHTAYIARVIRHVALIQLGWLGEDGRDPTPEKQNPALRFQVTNGQLTSRLRQAWGLNHLLHPLPHGALFHELPPEQQKQFQEKNRGDLRHHALDAMVIACTLPWLAHRTVGATDPETGEHGWWKLDERSQRSLALNPVFPQEGALRRVAEEWMKRVIVRHHVSRSPHQSAYATTIYGKKAPDSYAAREVFTTLTPKNLSSIWPKDFAAYCEVAWERYCAESPDIDAELKRSKGCVPEAFTSKLCFAHFKTWRATGASGFDWPSEVKIPIRSVKLISVKDDTVVAPASPGTKGFVKRTGFKEVRIHLAEDRTSFVPVFVPYWKGDAIPPEKPVEP

SEQ ID NO: 9110 - protein, 1065 aa, synthetic construct
  REGION 1..1065: note = Synthetic
MESTTCKGMEAFRHGLVFGFDVGTGSIGWAVREGDRFLDVGVLICPEETSKLDGRRGLRRQRRTLRSKKYRRQWFARELAGMLGLELIRRGDESLALPETAWEQNLKGGWIPKTGFESLMDPVTLRMAAVNGEDLRPEEIFTALTHLFRRRGYAPVPWAGGEASRTPDDDTEEGQIKEAVAGVAKELGDRHPCQLLAERRATAGNAPTDKWGRKVYWPRERLEREFRAIVAANATRHPKLVQKADWLLYGDTQEVKGQHVYFKHSEGRNPGVLGLRWPRFENRGPSLDALSPFDDQSRPQHVVRKDKEAFRSAQWELAVMNFRVIDRATGATVAPDTMAMKRLREMWDNSRRKPGRKSGASSSSPEPKRVEVKLKLLEKWAKEFADRYKLNEHQQPLTPQTGSGRARYSSPTLRLIHERLEGGLTFDPPQPLLRRPEESASKALERYLADIKHPLVKHRLVLFARLLKRLARHFGEPDVIVLEAVRSLALSEKNKRELQKKNAANRDERAAIREELASRMASTSRNAVLRYRLWKEAQGTCPFCCDKITQAQLLSGEADIEHLVPRTVVDCNEFYNLTVGHIRCNRELKGNATPHEAFGQTDRWSQLRDNAEKCFKGQKLEVFLSDKAEELIARKADLQHTAYIARVIRHVALIQLDWTGQDGRDPTVEKGNTPSSSFQVTNGQLTSRLRKAWGLNHLLHPLPHGVLFHELPKEQQKQFQEKNRGDLRHHALDAMVIACTLPWLAHRTVGATDPQTGEHGWWNLEERGQRSLAINPVYPGEGQMRRVVAEQMEKVVVRHHVSRSPHKAAYNTTVYGKLRDNTYAAREKVVDLKRKDFKDIHPPELGAYFDAAWTRFEEDTPDLSSLLRRTKDKLPESFRSRLCFAHFQRWRDGGAPEFEWPGTVRIPIRRVKLISVKDDTAVMPFAPGTPGFVKRTSFREVRIHVSRDRGRFVPVFVPHWRNDAVVAETPYVGSPIAVFRRGQTVVTKKPLGPKGPPGRYRIVATMQAKPQLVPVHIAKQKEALLAWGFYENGVNVSWGTFLDALGYELPHPSSAQPQSAGPVPA

SEQ ID NO: 9111 - protein, 1115 aa, synthetic construct
  REGION 1..1115: note = Synthetic
MNNSYTRFLNGLVFGFDVGTGSIGWAVRKGREFLDVGVLICPEEAGKLDTRRNLRRQRRTLRSKKYRRQWLARELAALLDLKLIQSAGDGQLPLPESAWTRNAKGGWVPQPGFESLRDPVALRVAALAGKPLRPEELFTALTHLFRRRGYTKVPWATSAEMAGKEDKPKNGNDDREEGDILKAVAGVRREMEAKQCEHPCQLLALRDKEHALWRQSLEQADKQQRPQAEVLAELWTAQGMKGQPPTEEPRQRKTYWPRELLEKEFRAVAAAQSAPGRFPQILEKTDWLLYGDTREVKGHRVYFKQTEARNPGVLGLKWPRFENRGPALDALRPLDEQGRPLHVVRKNKEAFTKAQWELAVMNFRVIHRMTGANVAPDSRAMARLREMWESSRRKKKGGTAAAPEAPVRVEIKLSLLQKWEKEFASRYKLIDGQQPLTPQTGAGRARYSSPTLEMIRQQLEQGVRFDPPQPLLRRPGESARRALDRYLADIKHPLVRHRLVLFSRLLEKLVRQYGEPDLIVLEAVRSLALSEKNKRELQNRIKANRDERESIRQDLAVRNASTSRKAILRYRLWKEAQSTCPFCGDKITQEQLLNGEADIEHLVPRSVVDCNEFYNLTIGHLRCNREIKGDRTPFQAFAHTEHWPQLRDNAEKCFKGRKLEIYLSEKAEELIEQKADLQHTAYIARVIRHVALIQLGWTGEDGRDPTIVKGNTPSSSFQVTNGQLTSRLRQAWGLNQILHPLPEGKRWDDLTDAEREQLQQKNRGDLRHHALDAMVIACTLPWLAHRTVGATDPETGEHGWWKLDERTQRSLAVNPVFPGDGQMRKVATDQIAKVIVRHHVSRSPHQSAYATTIYGKKAPNTYVAREEFTTLTPKNLASIWPPDFSAYCQAAWARYEDEASDIATELKRSKGCVPESFTSRLCFAHFQKWREQAKRGGNTEFSWPDAVKIPIRRVKLISVKDDTAVMRFAPGTPGFVKRTGFKEVRIHLSEDGKSFVPVFVPFWKEDSISPEKLIKPRSTPLATIRRGMVVETKKPSSAGWPAAKYRVLVTGQERIKLLPCHVANTEEAMAAFNLPKKALQLTWPDFIRCIGHELPHPPSAQSASTGAGEAGPASH

SEQ ID NO: 9112 - protein, 1114 aa, synthetic construct
  REGION 1..1114: note = Synthetic
MSNSLNGFLKGLVFGFDIGTGSIGWAVRQGDKFLDVGVLICPEETGKLDTRRNLRRQRRTLRSKKYRRQWFARELAALLGLELIQQDDSTLPLPESAWTRNDRGGWVPKPGFESLRDPVALRLAAVEGKPLRPEELFTALTHLFRRRGYTKVPWAASSENTKGDGPTDRNGGDGEEGDILKAVEGVRREMEAKQCEHPCQLLARRDQERALWQRSLEVAEQQRRPHAEVLAELWAAEKMKGEPPKEEPRQRKTYWPRELLAREFRAIAAAQSDPARFPIILEKADWLLYGDTREVKGHRVYFKHTEARNPGVLGLKWPRFENRGPALDALHPVDEEGRPLHVVRKNKEAFIKAQWELAVMDFRVIDRMTGAKVAPDVQAMARLREMWESSRRKKKAKTPGSSEPSTRVEIKVSLLQKWEKEFGDRYKLIEGQQPLTPQTGAGRARYSSPTLEMIRKQLEQGLRFDPPQPVLRRPGETARRALDRYLADIKHPLVRHRLVLFSRLLEKLVRRYREPDLIVLEAVRSLALSEKNKRELQKRIKENRDERESIRQDLAGRNASTSRKAILRYRLWKEAQCTCPFCGEKITQEQLLNGEADIEHLVPRSVVDCNEFYNLTVGHLRCNRELKGDRTPFQAFGHTEHWPQLRDNAEKCFKGRKLEIFLSNKAEELIEQKADIQHTAYIARVVRHVALIQLGWIGEDGRDPTIVKGNRPSSSFQVTNGQLTSRLRQAWGLNQILHPLPNGKRWEDLTDAEREQLQQKNRGDLRHHALDAMVIACTLPWLAHRTVGATDPETGEHGWWKLDERTQRSLAINPVFPLEGAMHAACKAWMERVVVQHHVSRSPHQSAYATTIYGKKAPNTYVAREVFTSLTPKNLGSIWPPDFSAYCQAAWARYEDEASDIATELKRSKGCVPESFTRRLCFAHFQKWREQSRRSGNTDFSWPEAVKIPIRSVKLISVKDDTAVRPFAPGTPGYVKRTGFKEVRIHLSQDGKSFVPVFVPFWKIDAVPPEKPIRDGSKPVAVIRRGQIVEIKNSPSKNTPCGFYRVASTMQKNIQLIPSHLADKKETLKAAGFLENGVNISWATFIKATGHELPHPPSAESKPAGPGEAGPAPH

SEQ ID NO: 9113 - protein, 1074 aa, synthetic construct; identical to SEQ ID NO: 8247
  REGION 1..1074: note = Synthetic

SEQ ID NO: 9114 - protein, 1122 aa, synthetic construct
  REGION 1..1122: note = Synthetic
MQSFDIARFRSGLVFGFDVGTGSIGWAVRRGDQFLDVGVLVCPEETAKLDSRRSRRRQRRTLRSKKYRRQWFARELAGLLGLKLIRQGQSELPLPDTAWEQNARGGWVPKPGFESLRDPVALRVAAAKGQPLRPEELFTALTHLFRRRGYLADVPWGNREAEAKDPDAKKEEGEIRARISALEGEMQAKGCELPCQLLAVRAQERALWLEARARAEKENRSHAEVLAELWTAENMKGEPPAAEPRQRKEVWPRDLVEKEFRAILAQQAARFPALDGTKTFQRDGQPRTVSVADWLLYGDTVRVRKNGSEYRVYFKATESRNPGVLGLKWPRFDNRGPALDVLRPFDDQGRPLHVVRKNKQAFIEAQWELAVMNFRVVDRQTGALVAPDARALTRLRELWESSRRKDRKKKTDAASESERPARVEIRLSLLQKWEKEFADRYKLVEGQQPLMPQTGAGRARYSSLTLEQIRQLLAQGVRFDPPQPVLRRPGESAQRALDRYLADIKHPLVRHRLVLFSRLLDRLVKRYGQPDLIVIEAVRSLALGEKNKRELLKRIKENRDERESIRHELASRNASTSRSAILRYRLWKEAQSTCPFCGDKITQQQLLNGEADIEHLVPRSVVDCNEFYNLTVGHVRCNRELKGDRTPFQAFGHTEKWAQLRGNAEKCFKGRKLEIFLSPNAEQLIEQKADLQHTAYIARVVRHVTLIRLGWTGADGRDPTIIKGNKPSSSFQVTNGQLTSRLRQAWGLNQILHPLPEGKRWEDLTEEEQRQFTEKNRGDLRHHALDAMVIACTLPWLAHRTVGATDPDTGEHGWWRLDERTRRSLAINPVFPAEGQMRHVAEEWMKKVVVRHHVSRSPHQSAYATTIYGKKAPDTYVAREVFATLTPKNLGDIWPPDLADYCQAAWARYAEESADLEAELKRTKGCVPENFTSRLCFAHFQRWRERVKRGENVEFTWPAIVKIPIRSVKLISVKDDSAVTRFAPGTPGYVKRTGFKEVRIHLSADGKSFVPVFVPYWKGDQPLAPAPFSGDPIAVLRRGDIVKLNRPTGPKNPPGIYRISTTMQDNIQLIPAHLAKDPGALLASGYLANGVTISWKTFLAAAGYELPHPPSAQPQPPGALPT

SEQ ID NO: 9115 - protein, 1071 aa, synthetic construct
  REGION 1..1071: note = Synthetic
MPGTTSFETFRNGLVFGFDLGTGSIGWAVRRGSEFLDVGVLICPEETTKLDSRRSLRRQRRTLRSKKYRRQWFARELAALLGLKLVQHNGQELPLPDTAWELNANGGWVPKPGFESLRDPVALRVAAAAGRPLRAEELFTALTHLFRRRGYLADVPWRNRETESKDADAKKEEDEIRSRMSALQAEMQTNGCRLPCQLLALRARNGQRQRKEIWPRELVETEFRAIVAAQADRYPPLAQKADWLLYGDTRQVKGHPVYFKATESRNPGVLGLKWPRFDNRGPALDVQRPVDEQGRPQHVVRKNKQAFQQAQWELAVMNFRVIDRNTGALTAPAPQALARLREIWESSRRRRKSKASGTADAPGHVEIKLSILQKWEQEFASQYKLVEGQQPLTPQTGAGRARYSSPTLKMIREQLARGDRFDPPQPVLIRHGESQQRALERYLADIRHPLVRHRLLLFSRLLKKLVKSHGEPDLIVLEAVRSLALGEKKKRELIKRNKENRDEREAIRQELASRQASTSRNAILRYRLWKEARYTCPFCGDKITQEQLLSGEADIEHLVPRSVVDCNEFYNLTIGHVRCNREIKGDRTPFQAFGHTDKWPQLRDNAVNCFRGRKLEIFLSDKAEELIEQKADLQHTAYIARVVRHVALIQLGWTDENGRDPTIVKGNRPSSSFQVTNGQLTSRLRQAWGLNQILHPLPEGKRWDDLTDAERERWQQKNRGDLRHHALDAMVIACTLPWLAHRTVGATDPETGERGWWQLDERTRRSLAINPVFPGEGQMRRVVEEWMQKAAVHHHVSRSPHQRAYDTTIYGKKAPNTYVAREVFTTLTPKNLASIWPPEFAAYCQAAWTRYEAESPDIEAELKRTKDCLPEAFTNRLCFAHFQQWRERVKRGDNVEFTWPAMVKIPIRSVKLISVKDDTAVMRFAPGTPGYVKRTGFKEVQIFLAEDERSFVPLFVPYWTGDFIPTDKPVKTGSKPLTVIRRGMVVQTVHASSAGWPAGKYRVLVTGQERIKLLPCHVANTEEALAAFNLPKKALQLTWPDFIRCLGYELPHPPSAQPASPGTGEVGPAPH

SEQ ID NO: 9116 - protein, 915 aa, synthetic construct
  REGION 1..915: note = Synthetic
RETESNDADAKKEEGEIRSRMSDLQAEMQTNGCRLPCQLLALRARNGQRQRKEIWPRELVETEFRAIVAAQADRYPPLAQKADWLLYGDTRQVKGHPVYFKATESRNPGVLGLKWPRFDNRRPALDVQRPVDEQGRPQHVVRKNKQAFQQAQWELAVMNFRVIDRNTGALTAPAPQALARLREIWESSRRRRKSKASGTADALGPVEIKPSILQKWEQEFASQYKLVDGQQPLTPQTGAGRARYSSPTLKMIREQLARGDRFDPPQPVLIRHGESQQRALERYLADIRHPLVRHRLLLFSRLLKKLVKSHGEPDLIVLEAVRSLALGEKKKRELIKRNKENRDEREAIRQELASRQASTSRNAILRYRLWKEARYTCPFCGDKITQEQLLSGEADIEHLVPRSVVDCNEFYNLTIGHVRCNREIKGDRTPFQAFGHTDKWPQLRDNAVNCFRGRKLEIFLSDKAEELIEQKADLQHTAYIARVVRHVALIQLGWTDENGRDPTIVKGNRPSSSFQVTNGQLTSRLRQAWGLNHILHPLPEGKRWDDLTDAERERWQQKNRGDLRHHALDAMVIACTLPWLAHRTVGATDPETGEHGWWQLDERTRRSLAINPVFPGEGQMRRVVEEWMQKAAVHHHVSRSPHQAAYDTTIYGKKAPNTYVARKVFSTLKPKNLASIWPPEFAAYCQAAWTRYEAESPDIEAELKRTKGCLPEAFTNRLCFAHFQQWRERVKRGDNVEFTWPKSVKIPIRSVKWIGVKDDYAVAPASPGTKGFVARGGRSPFREVQVHVSADGKSLVPVFIPSWRGDAPIAKAPIAKCGQAVATIRRGQIVEIKNSPGPNTPCGVYRVASTMQKNIQLIPTHLADRKETLKAAGYLENGVNISWETFLQAAGYELPRPPSAQPASPGAGEVGPAPH

SEQ ID NO: 9117 - protein, 858 aa, synthetic construct
  REGION 1..858: note = Synthetic
ELVETEFRAIVAAQADRYPPLAQKADWLLYGDTRQVKGHPVYFKATESRNPGVLGLKWPRFDNRGPALDVQRPVDEQGRPQHVVRKNKQAFQQAQWELAVMNFRVIDRNSGALTAPAPQALARLREIWESSRRRRKSKASGTADALGHVEVKLSILQKWEQEFASQYKLVDGQQPLTPQTGAGRARYSSPTLRMIREQLACGVRFDPPQPVLIRPGESQQRALERYLADIKHPLVRHRLLLFSRLLQKLVKSHGEPDLIVLEAVRSLALGEKKKRELIKRNKENRDEREAIRQELASRQASTSRNAILRYRLWKEARSTCPFCGDKITQEQLLSGEADIEHLVPRSVVDCNEFYNLTIGHVRCNREIKGDRTPFQAFGHTDKWPQLRDNAVNCFRGRKLEIFLSDKAEELIEQKADLQHTAYIARVVRHVALIQLGWTDENGRDPTIVKGNRPSSSFQVTNGQLTSRLRQAWGLNQILHPLPEGKRWDDLTDAERERWQQKNRGDLRHHALDAMVIACTLPWLAHRTVGATDPETGEHGWWQLDERTRRSLAINPVFPGEGQMRRVVEEWMQKAAVHHHVSRSPHQRAYETTIYGKKAPNTYVARKVFSTLKPKNLASIWPPKFAAYCQAAWTRYEAESPDIEAELKRTKDCLPEAFTNRLCFAHFQQWRERDKRGDNVEFTWPKTVKIPIRSVKWIGVKDDYAVAPASPGTKGFVARGGRSPFREVQVHVSADGKSLVPVFIPSWRGDAPIAKAPIAKCGQAVATIRRGQIVEIKNSPGPNTPCGLYRVASTMQKNIQLIPTHLADRKETLKAAGYLENGVNISWETFLQAAGYELPRPPSAQPASPGAGEVGPAPH

SEQ ID NO: 9118 - protein, 1074 aa, synthetic construct
  REGION 1..1074: note = Synthetic
MPGTTSFETFRNGLVFGFDLGTGSIGWAVRRGSEFLDVGVLICPEETTKLDSRRSLRRQRRTLRSKKYRRRWFARELAALLGLKLVQHNGQELPLPDTAWGLNANGGWVPKPGFESLRDPVSLRVAAAAGRPLRAEELFTALTHLFRRRGYLPDVPWRNRETESKDADAKKEEGEIRSRMFDLEKEMQTNGCRLPCQLLALRARNGLRQRKEIWPRKLVETEFRAIVAAQADRYPPLAQKADWLLYGDTRQVKGHPVYFKATESRNPGVLGLKWPRFDNRGPALDVQRPVDEQGRPQHVVRKNKQAFQQAQWELAVMNFRVIDRNTGALTAPAPQALARLREIWESSRRRRKSKASGTAYALGPVEIKPSILQKWEQEFASQYKLVNGQQPLTPQTGAGRARYSSPTLKMIREQLARGVRFDPPQPVLIRPGESQQRALERYLADIKHPLVRHRLLLFSRLLQKLVKSHGEPDLIVLEAVRSLALGEKKKRELIKRNKENRDEREAIRQELASRQASTSRNAILRYRLWKEARSTCPFCGDKITQEQLLSGEADIEHLVPRSVVDCNEFYNLTIGHVRCNREIKGDRTPFQAFGHTDKWPQLRDNAVNCFRGRKLEIFLSDKAEELIEQKADLQHTAYIARVVRHVALIQLGWTDENGRDPTIVKGNRPSSSFQVTNGQLTSRLRQAWGLNQILHPLPEGKRWDDLTDAERERWQQKNRGDLRHHALDAMVIACTLPWLAHRTVGATDPETGEHGWWQLDERTRRSLAINPVFPGEGQMRRVVEEWMQKAAVHHHVSRSPHQRAYETTIYGKKAPNTYVARKVFSTLKPKNLASIWPPKFAAYCQAAWTRYEAESPDIEAELKRTKDCLPEAFTNRLCFAHFQQWRERDKRGDNVEFTWPKTVKIPIRSVKWIGVKDDYAVAPASPGTKGFVARGGRSPFREVQVHVSADGKSLVPVFIPSWRGDAPIAKAPIAKCGQAVATIRRGQIVEIKNSPGPNTPCGVYRVASTMQKNIQLIPTHLADRKETLKAAGYLENGVNISWETFLQAAGYELPRPPSAQPASPGAGEVGPAPH

SEQ ID NO: 9119 - protein, 1074 aa, synthetic construct
  REGION 1..1074: note = Synthetic
MPGTTSFETFRNGLVFGFDLGTGSIGWAVRRGSEFLDVGVLICPEETTKLDSRRSLRRQRRTLRSKKYRRRWFARELAALLGLKLVQHNGQELPLPDTAWGLNANGGWVPKPGFESLRDPVSLRVAAAAGRPLRAEELFTALTHLFRRRGYLPDVPWRNRETESKDADAKKEEGEIRSRMFDLEKEMQNNGCRLPCQLLALRARNGLRQRKEIWPRKLVETEFRAIVAAQADRYPPLAQKADWLLYGDTRQVKGHPVYFKATESRNPGVLGLKWPRFDNRGPALDVQRPVDEQGRPQHVVRKNKQAFQQAQWELAVMNFRVIDRNTGALTAPAPQALARLREIWESSRRRRKSKASGTAYALGPVEIKPSILQKWEQEFASQYKLVNGQQPLTPQTGAGRARYSSPTLKMIREQLARGVRFDPPQPVLIRPGESQQRALERYLADIKHPLVRHRLLLFSRLLQKLVKSHGEPDLIVLEAVRSLALGEKKKRELIKRNKENRDEREAIRQELASRQASTSRNAILRYRLWKEARSTCPFCGDKITQEQLLSGEADIEHLVPRSVVDCNEFYNLTIGHVRCNREIKGDRTPFQAFGHTDKWPQLRDNAVNCFRGRKLEIFLSDKAEELIEQKADLQHTAYIARVVRHVALIQLGWTDENGRDPTIVKGNRPSSSFQVTNGQLTSRLRQAWGLNQILHPLPEGKRWDDLTDAERERWQQKNRGDLRHHALDAMVIACTLPWLAHRTVGATDPETGEHGWWQLDERTRRSLAINPVFPGEGQMRRVVEEWMQKAAVHHHVSRSPHQRAYETTIYGKKAPNTYVARKVFSTLKPKNLASIWPPKFAAYCQAAWTRYEAESPDIEAELKRTKDCLPEAFTNRLCFAHFQQWRERDKRGDNVEFTWPKTVKIPIRSVKWIGVKDDYAVAPASPGTKGFVARGGRSPFREVQVHVSADGKSLVPVFIPSWRGDAPIAKAPIAKCGQAVATIRRGQIVEIKNSPGPNTPCGLYRVASTMQKNIQLIPTHLADRKETLKAAGYLENGVNISWETFLQAAGYELPRPPSAQPASPGAGEVGPAPH

SEQ ID NO: 9120 - protein, 844 aa, synthetic construct
  REGION 1..844: note = Synthetic
LVKLGLEKPLYAENNNGGFEPAKGFESLNDPVALRLRALSGDALKPEELHTALAHLFRRRGYTEVPWKNRPDAKEDGDEKKELGEIKSKMSGLQKEMHEAGCKFPAQLLAKRKAAGLSQRREVWPRELMEDEFRAIVAAQKEQFPKLGEKADWLLHGDSDEINRNGNTYHVFFKTTESRNPGVVGLRWPRFDNRGPALDSFQPVDNEGRPLHVVRKNKQAFIKAQWELALMNFRVLDCATNKLVSPDLPSLLRLREIWENSKRTKKKKNPEAGESETVSISESVLKKWAKEYVKRYKLVEGQTELTPQSGAGRARYCSPTLELLQKEISAGRRIDPPQPILKRSGENTQRALDRYLNDINHPLVRHRLILFRRLLAKLTDNFGAPDTIVVEAVRSLAMGPIKKREHIQRNKKNRDERESIRTELKKDNFSSSKNSIKRFRLFKAARARCPFCLCPFCLQAVIFKEAEIEHIVPQSCVDCDEFYNLTVAHRACNQRKGNKTPYEAFGNTPEWESIRKNAESCFGFGSLKYQLFTSPDAENLVEQKADLQHTAYIARVLRHIALIQLDWLGSDGRDSTDQKDPQKTAWRFQVTNGQLTSRLRKAWGLNQILHPLPPGKRWDELSPEEQKQFTEKNRGDLRHHALDAMVIVCTLPWLAHRTHGAKDELGRHGWWTQDEKQRSKAVNPLFPGEGQMHDIVKKEIQKVVVQHHVSRSNHQQAYNTTLYAKKGKNTYVARKPFTRITVKNLSSIYPKEFAAYCEAAWSRYSEESPDIQAELKKTNKSLPESFTKKLCFSHFQRWRVDLAPTFTWPEKIKIPIGSVRLISIKDDSAVIPFSKGTHAFVERS

SEQ ID NO: 9121 - protein, 1068 aa, synthetic construct
  REGION 1..1068: note = Synthetic
MAIAYFDKSIEGFNTSFVTMKNSPADFFNGLVFGFDVGTGSIGYAVRKGAEFLDVGVLICPEDTVELKGRRGLRRQRRTLRSRNYRRKWFAAELVKLGLEKPLYAENNNGGFEPAKGFESLNDPVALRLRALSGDALKPEELHTALAHLFRRRGYTEVPWKNRPDAKEDGDEKKELGEIKSKMSGLQKEMHEAGCKFPAQLLAKRKAAGLSQRREVWPRELMEDEFRAIVAAQKEQFPKLGEKADWLLHGDSDEINRNGNTYHVFFKTTESRNPGVVGLRWPRFDNRGPALDSFQPVDNEGRPLHVVRENKQAFIKAQWELALMNFRVLDCATNKLVSPDLPSLLRLREIWENSKRTKKKKNPEAGESETVSISESVLKKWAKEYVKRYKLVEGQTELTPQSGAGRARYCSPTLELLQKEISAGRRIDPPQPILKRSGENTQRALDRYLNDINHPLVRHRLILFRRLLAKLTDNFGAPDTIVVEAVRSLAMGPIKKREHIQRNKKNRDERESIRTELKKDNFSSSKNSIKRFRLFKAARARCPFCLCPFCLQAVIFKEAEIEHIVPQSCVDCDEFYNLTVAHRACNQRKGNKTPYEAFGNTPEWESIRKNAESCFGFGSLKYQLFTSPDAENLVEQKADLQHTAYIARVLRHIALIQLDWLGSDGRDSTDQKDPQKTAWRFQVTNGQLTSRLRKAWGLNQILHPLPPGKRWDELSPEEQKQFTEKNRGDLRHHALDAMVIVCTLPWLAHRTHGAKDELGRHGWWTQDEKQRSKAVNPLFPGEGQMHDIVKKEIQKVVVQHHVSRSNHQQAYNTTLYAKKGKNTYVARKPFTRITVKNLSSIYPKEFAAYCEAAWSRYSEESPDIQAELKKTNKSLPESFTKKLCFSHFQRWRVDLAPTFTWPEKIKIPIGSVRLISIKDDSAVIPFSKGTHAFVERTGFKEVRLYLSDDGKSYVPVFVPYWKSDEPFSDEPFNKKSKPVATVCKGQIIELKKSLSSGAPPGKYRVMVMGQEQIKILPPHVANKDEAKLAFKLPKSGIQPYWNDFIRALGYELPHSPSTQPSSTSAAEA

SEQ ID NO: 9122 - protein, 975 aa, synthetic construct
  REGION 1..975: note = Synthetic
LVKLGLEKPLYAENNNGGFEPAKGFESLNDPVALRLRALSGDALKPEELHTALAHLFRRRGYTEVPWKNRPDAKEDGDEKKELGEIKSKMSGLQKEMHEAGCKFPAQLLAKRKAAGLSQRREVWPRELMEDEFRAIVAAQKEQFPKLGEKADWLLHGDSDEINRNGNTYHVFFKTTESRNPGVVGLRWPRFDNRGPALDSFQPVDNEGRPLHVVRENKQAFIKAQWELALMNFRVLDCATNKLVSPDLPSLLRLREIWENSKRTKKKKNPEAGESETVSISESVLKKWAKEYVKRYKLVEGQTELTPQSGAGRARYCSPTLELLQKEISAGRRIDPPQPILKRSGENTQRALDRYLNDINHPLVRHRLILFRRLLAKLTDNFGAPDTIVVEAVRSLAMGPIKKREHIQRNKKNRDERESIRTELKKDNFSSSKNSIKRFRLFKAARARCPFCLCPFCLQAVIFKEAEIEHIVPQSCVDCDEFYNLTVAHRACNQRKGNKTPYEAFGNTPEWESIRKNAESCFGFGSLKYQLFTSPDAENLVEQKADLQHTAYIARVLRHIALIQLDWLGSDGRDSTDQKDPQKTAWRFQVTNGQLTSRLRKAWGLNQILHPLPPGKRWDELSPEEQKQFTEKNRGDLRHHALDAMVIVCTLPWLAHRTHGAKDELGRHGWWTQDEKQRSKAVNPLFPGEGQMHDIVKKEIQKVVVQHHVSRSNHQQAYNTTLYAKKGKNTYVARKPFTRITVKNLSSIYPKEFAAYCEAAWSRYSEESPDIQAELKKTNKSLPESFTKKLCFSHFQRWRVDLAPTFTWPEKIKIPIGSVRLISIKDDSAVIPFSKGTHAFVERSGFKEVRLYLSDDGKSYVPVFVPYWKSDEPFSDEPFNKKSKPVATVCKGQIIELKKSLSSGAPPGKYRVMVMGQEQIKILPPHVANKDEAKLAFKLPKSGIQPYWNDFIRALGYELPHSPSTQPSSTSAAEA

SEQ ID NO: 9123 - protein, 1045 aa, synthetic construct
  REGION 1..1045: note = Synthetic
MNVKSSCSDFLNGLVFGFDVGTGSIGEAVRKGEDFKDVGVLICPEDTSDLSGRRGLRRQRRTLRSRKYRRRWFAKELENLGLPKPQSQPHDPITLRLRALNGEELKPEELHAALAHLFRRRGYSKVPWANVEKAANAATKPKKDDDEGEIIESANSIKADMEKRGCQHPCQYLAKRREEAGKSPSEKWGRKIYWLRDLLEGEFRDIVQVQAKRFAKLAEKADWLLYGESKEVKRPDGEYHVFFKTTEARNPGVLGLRWPRFDNRGPALDSFQPVDEQGRPFHVVRKNKEAFTKAQWELAVMNFRVIEIATGKTVPPDTKSMVRLREIWESKKRGKKPKSANAVPEIQPPKVLEISKSVLGKWAEEFSNQYKLVEGQQPLTPQTGAGRARYSSPTLERIVSGERFDPPQPVLRRNGENAEEALNRYLADIKHPLVRHRLVLFRRLLTELILRFGQPDMIVLEAVRSLALSPTKKREHIQRLHNNREERTGIREELKKDGFSSSKNSILRYRLFKEAKGRCPFCLCPFCLKEVIFKEAEIEHIVPRSRVDSNEFFNLTVAHRDCNQHKGERTPWEAFGNTPEWEGIRQNAEDCFGLGSLKYRLFTNPDAENLVEQKADLQHTAYIARVIRHISPIQLDWLGEDGRDPSGLKDPQKTAWRFQVTNGQLTSRLRKAWGLNQILHPLPAGKRWDELTEPEQKQFTEKNRGDLRHHALDAMVIACTLPWLAHRTHGAKDEFGNHGWWTQDEKQRSKAANPIFPREGRMHEVVKREIERVVVQHHASRSNHQQGYNTTLYAKKDKDIYVVRKPLTSLTVKNLSSIYPNELAAYCEATWERYAEESANLDAELKKTNKHLPENFAKKLCFSHFQRWRADFAPAFRWPEKVNIPIKSVRLVAIKDDRAVVPFSKGTRAYVERTGFKEVRIHPSEDGKSFVPVFVPYWKGDSPFSSYSFAPNSKPVAVIHKGQVVELKKALAAGAPAGKYRVLVMGQEQIKILPPHVANKDEAKIAFQLPKSGLQPYWPEFIRCIGYELPHPPSAQSQSPGAVQA

SEQ ID NO: 9124 - protein, 1045 aa, synthetic construct
  REGION 1..1045: note = Synthetic
MNVKSSCSDFLNGLVFGFDVGTGSIGEAVRKGEDFKDVGVLICPEDTSDLSGRRGLRRQRRTLRSRKYRRRWFAKELENLGLPKPQSQPHDPITLRLRALNGEELKPEELHAALAHLFRRRGYSKVPWANVEKAANAATKPKKDDDEGEIIESANSIKADMEKRGCQHPCQYLAKRREEAGKSPSEKWGRKIYWLRDLLEGEFRDIVQVQAKRFAKLAEKADWLLYGESKEVKRPDGEYHVFFKTTEARNPGVLGLRWPRFDNRGPALDSFQPVDEQGRPFHVVRKNKEAFTKAQWELAVMNFRVIEIATGKTVPPDTKSMVRLREIWESKKRGKKPKSANAVPEIQPPKVLEISKSVLGKWAEEFSNQYKLVEGQQPLTPQTGAGRARYSSPTLERIVSGERFDPPQPVLRRNGENAEEALNRYLADIKHPLVRHRLVLFRRLLTELVLRFGQPDMIVLEAVRSLALSPTKKREHIQRLHNNREERTGIREELKKDGFSSSKNSILRYRLFKEAKGRCPFCLCPFCLKEVIFKEAEIEHIVPRSRVDSNEFFNLTVAHRDCNQHKGERTPWEAFGNTPEWEGIRQNAEDCFGLGSLKYRLFTNPDAENLVEQKADLQHTAYIARVIRHISPIQLDWLGEDGRDPSGLKDPQKTAWRFQVTNGQLTSRLRKAWGLNQILHPLPAGKRWDELTEPEQKQFTEKNRGDLRHHALDAMVIACTLPWLAHRTHGAKDEFGNHGWWTQDEKQRSKAANPIFPREGRMHEVVKREIERVVVQHHASRSNHQQGYNTTLYAKKDKDIYVVRKPLTSLTVKNLSSIYPNELAAYCEATWERYAEESANLDAELKKTNKHLPENFAKKLCFSHFQRWRADFAPAFRWPEKVNIPIKSVRLVAIKDDRAVVPFSKGTRAYVERTGFKEVRIHPSEDGKSFVPVFVPYWKGDSPFSSYSFAPNSKPVAVIHKGQVVELKKALAAGAPAGKYRVLVMGQEQIKILPPHVANKDEAKIAFQLPKSGLQPYWPEFIRCIGYELPHPPSAQSQSPGAVQA

SEQ ID NO: 9125 - protein, 1045 aa, synthetic construct
  REGION 1..1045: note = Synthetic
MNVKSSCSDFLNGLVFGFDVGTGSIGEAVRKGEDVKDVGVLICPEDTSDLSGRRGLRRQRRTLRSRKYRRRWFAKELENLGLPKPQSQPHDPITLRLRALNGEELKPEELHAALAHLFRRRGYSKVPWANVEKAANAATKPKKDDDEGEIIESANSIKADMEKRGCQHPCQYLAKRREEAGKSPSEKWGRKIYWLRDLLEGEFRDIVQVQAKRFAKLAEKADWLLYGESKEVKRPDGEYHVFFKTTEARNPGVLGLRWPRFDNRGPALDSFQPVDEQGRPFHVVRKNKEAFTKAQWELAVMNFRVIEIATGKTVPPDTKSMVRLREIWESKKRGKKPKSANAVPEIQPPKVLEISKSVLGKWAEEFSNQYKLVEGQQPLTPQTGAGRARYSSPTLERIVSGERFDPPQPVLRRNGENAEEALNRYLADIKHPLVRHRLVLFRRLLTELVLRFGQPDMIVLEAVRSLALSPTKKREHIQKLHNNREERTGIREELKKDGFSSSKNSILRYRLFKEAKGRCPFCLCPFCLKEVIFKEAEIEHIVPRSRVDSNEFFNLTVAHRDCNQHKGERTPWEAFGNTPEWEGIRQNAEDCFGLGSLKYRLFTNPDAENMVEQKADLQHTAYIARVIRHISPIQLDWLGEDGRDPSGLKDPQKTAWRFQVTNGQLTSRLRKAWGLNQILHPLPAGKRWDELTEPEQKQFTEKNRGDLRHHALDAMVIACTLPWLAHRTHGAKDEFGNHGWWTQDEKQRSKVANPIFPREGRMHEVVKREIERVVVQHHASRSNHQQGYNTTLYAKKDKDIYVVRKPLTSLTVKNLSSIYPNELAAYCEATWERYAEESANLDAELKKTNKHLPENFAKKLCFSHFQRWRADFAPAFRWPEKVNIPIKSVRLVAIKDDRAVVPFSKGTRAYVERTGFKEVRIHPSEDGKSFVPVFVPYWKGDSPFSSYSFAPNSKPVAVIHKGQVVELKKALAAGAPAGKYRVLVMGQEQIKILPPHVANKDEAKIAFQLPKSGLQPYWPEFIRCIGYELPHPPSAQSQSPGAVQA

SEQ ID NO: 9126 - protein, 1037 aa, synthetic construct; identical to SEQ ID NO: 8248
  REGION 1..1037: note = Synthetic

SEQ ID NO: 9127 - protein, 1043 aa, synthetic construct
  REGION 1..1043: note = Synthetic
MKDYVLKDANQSPSGKDFFLNGLVFGFDVGTGSIGYAVRQGSEFKDVGVLICDSEGSDLSGRRSLRRQRRTLRSKKYRRQWLAKELIKLGLLKPENPPNDPISLRLRALNGDKLTPGELHAALTHLFKRRGYSKVPWANVEKPAKENAKPKKDDKEGEIKKAVESIRKEMDEMKCEFPCQLLDVRRKEIGVSPAKDWARKIYWPRELLQKEFEAITKAQKNNFQKLAEKTDWLLYGDSQPKKKGEETYHVFFKTTEARNPGVLGLRWPRFDNRGPALDSLQPVDEQGRLLHVVRKTKDAFTKAQWELAVMNFRVIDRATGKLVTPDNKSLARLREIWESGKRKKKKDAPSNAEEADTVKISEPVLKRWAKDFAAQYKLVDGQQPLTPQTGAGRARYASPTLKKIIAGERFDPPQPLLRRKNETPEQALNRYLADIKHPLVRHRLVLFQRLLKKLVSQFGKPDMVVLEAVRSLALGKDKKRELIQRIHDNREEREGIRKELSKDGFSSSKNSILRYRLFKEAKGRCPFCLCPFCLQQVVFKEAEIEHIVPRSRVDCNEFYNLTVAHADCNKKKDNRTPWEAFGQTADWEALRKNAEECFGLGSMKYKLFTNPDAQDLVEEKSDLQHTAYIARVIRQAALIQLGWLGEDGRDPTGLKDPQKTAWKFQVTNGQLTSRLRKAWGLNQILHPLPADKKWDDLSEQEQQQFTEKNRGDLRHHALDAMVIACTLPWLAHRTYGATDEFGRHGWWTQDEKHRSRAVNRIFPNEGQMHEVVKSKIETVVVQHHESRSNHQQAYATTVYGKLAPDTYAARERLTDLKQSDFRDVHPKELGVYLDAAWERFREETSGLDVLLKKTNSKLPATFVEKLCFSHFQKWREDEAPAFTWPKTVKIPIRNVKLIAPVNDDSVLRFAPGTPGFVKRKTFKEVHIYLNADKKGFVPVFVPYWKGDKPVGIDQILPGSKPVAVLRKRSIIKTIKPLSTGHPPGNYCLYELGQVQPYLLPPHIAKKEEAIESFGIKKSGIKPRWPDLIRALGYELPHPPPVKP

SEQ ID NO: 9128 - protein, 1070 aa, synthetic construct
  REGION 1..1070: note = Synthetic
MKDYVLHESHPPAQPSFLTGLVFGFDVGTGSIGYAVRKGSEFKDVGVLICDSEGSDLSKRRDLRRQRRTLRSKKFRRQWFAKELGKLGLPKPTEEQLKRTSNETNEQFDQRTNPISLRVRALNEPLEKWQLFIALTHLFKRRGYEKDVPWANKEKDTKAKKKNDAEEWGSGTTPPEKVQSEFDASGCKYPCEFLARNPKNQRRRVWPRALLEKEFHAIAKAQTENKNFPQLTEKIDWLLYGKTKEVKGHHVYFKITEAQNPGVLGLHWPRFDNRGPALDSLQPVDEQGRPMHVVRKNKEAFTKAQWELALINFRVIDRASGKLVTPDSKSLVRLREIWESGKRKKKKESASDKEESETIKISEPVLKRWAKDFVGQYKLVDGQQPLTPQTGSGRARYSSPTLERIIAGEQFDPPQPLLRRKNETPEQALNRYMTDIKHPLVRQRLTLFQKLLQKLVSRFGKPDMIVLEAVRSLALGKDKKRELIQRIHNNREERDGIRKELSKDGFSSSKNSILRYRLFKEAKGRCPFCLCPFCLQEVVYKEAEIEHIVPRSRVDCNEFYNLTVAHQACNKKKDNRTPWEAYGGTNDWEALRKNAEDCFGIGSLKYQVFINPDAQNLIEEKSDLQHTAYIARVIRQVSLIQLNWLAEDGRDATGSKDHQMTAWRFQVTNGQLTSRLRKSWGLNQILHPFPSRDAWEAMTPEEQDKKKIEVQEKNRGDLRHHSLDAMVICCTLPWLAHRTHGAKDQFGQHGWWTQDEKQRSKASNPVFPKDGEMHDVVKNEIEKVVVKQHVSRSNHQQAYATTLYAKKADNTYVAREIFTSLTPKNLCNIWPDTFASYCETAWRRYADEAADLEDELKKTKGNLPPSFTNKLCFAHFQKWRADDCPEFYWPKEVKIPIRNVRLISVKDDTAVVPFSPGTHAYVKRTGFKEVRIYPTADKKGFVPVFIPYWKNDKPVSDKPIPENAKPIAIIRRGMIIELQKKPEKKYPSGKYRVVATMQGQIQLIPAHIKKDKVALLAAGFLENGINFKWDTFIKLLDREPPVAVEAIQKAKLGQGQYYPLSSLDEKERPN

SEQ ID NO: 9129 - protein, 706 aa, synthetic construct
  REGION 1..706: note = Synthetic
RRSIASQTSIRKVDMKTYVLKNANQSPTKNDPFMTGLVFGFDVGTGSIGYAVRKGSEFKDVGVLICDSEGSNLEERRNFRRQRRTLRSKKFRRQWFAKELVKLGLPKPTKEQLKRANNETNEQFDQRTNPVSLRVRALNEPLEKWQLFIALTHLFKRRGYEKDVPWANKEKDTKANKENDAEEWGSGTVPPEKVQSEFDASGCKYPCEFLARNPKHQRRRVWPRALLENEFHAIAKAQTENKIFPQLTEKTNWLLYGETKEVKGHHVYFKTTEAQNPGVLGLRWPRFDNRGPALDSLQPLDEQGRPLHVVRKNKETFRKAQWELALINFRVIDRATGNLVRPDDKSLIRLREIWESGKRKKKKESGSNAAESEIIKISEPVLKRWAKDFAGQYKLVDGQQPLTPQTGAGRARYSSPTLERIIAGEQFNPPQPLLRRKNESAEQALNRYMADIKHPLVRHRLTLFQKLLQQLVSRFGEPDMIVLEAIRSLAMGEKKRREHIQRIKENRDERESIRTELKKDNFSSSKNSILRYRLFKEAKGRCPFCLCPFCLQEVVYKEAEIEHIVPRSRVDCNEFYNLTVAHQECNKRKDNRTPWEAYGTTKDWEALRKNAEDCFGLGSLKYRLFTNPDAQNLVEEKSDLQHTAYIARVIRQVSLIQLGWLAEDGRDATGLKDPEMTAWRFQVTNGSLTSRLRKSWGLNQILNPFP

SEQ ID NO: 9130 - protein, 1082 aa, synthetic construct
  REGION 1..1082: note = Synthetic
MKFNISTNTDPFLTGLVFGFDVGTGSIGYAVRRGSTFLPDGVGVLICDSEGSKLDERRNFRRQRRTLRSKKFRRQWFAKELVKLGLPKPTKEQLKRANNETNEQFDQRTNPVSLRVRALNEPLEKWQLFIALTHLFKRRGYEKDVPWANKEKDTKANKENDAEEWGSGTVPPEKVQSEFDASGCKYPCEFLARNPKHQRRRVWPRALLENEFHAIAKAQTENKIFPQLTEKTNWLLYGETKEVKGHHVYFKTTEAQNPGVLGLRWPRFDNRGPALDSLQPLDEQGRPLHVVRKNKETFRKAQWELALINFRVIDRATGNLVRPDDKSLTRLREIWESGKRKKKKESGSNAAESEIIKISEPVLKRWAKDFAGQYKLVDGQQPLTPQTGAGRARYSSPTLERIIAGEQFNPPQPLLRRKNESAEQALNRYMADIKHPLVRHRLTLFQKLLQQLVSRFGEPDMIVLEAIRSLAMGEKKRREHIQRIKENRDERESIRTELKKDNFSSSKNSILRYRLFKEAKGRCPFCLCPFCLQEVVYKEAEIEHIVPRSRVDCNEFYNLTVAHQECNKRKDNQTPWEAYGTTKDWEALRKNAEDCFGLGSLKYRLFTNPDAQNLVEEKSDLQHTAYIARVIRQVSLIQLGWLAEDGRDATGLKDPEMTAWRFQVTNGSLTSRLRKSWGLNQILNPFPSKDAWEAMTPDEQEKKKTEMQEKNRGDLRHHSLDAMVIACTLPWLAHRTHGATDLFGRPGWWWLDEKKRSRASNPLFPNEGQMYDVVKKEIEKVVVKHHVSRSNHQRTYDTTIYGRPKRNGVPIRDCYVSREPIIALKPADLKSPKTGKSKIFPPELGDYLASAWEKYCETEPEWEKQIKANNKCLPEAFQKRLCFSDFQQWRADGAPAFIWPKQVKIPIKRVGYIGVEDDSAVAPASPGTKGFVARGSFREVRLHPSEDGKSLVPVFVPLWRLDKPIPKAPIKTDSESVAVIRRGQTVEIKNSPGRNTPVGKYRVASTMQQNIKLLPVYLADIKEALKASGFLENGVNISWDTFIKSAGYELSQLPDAPRFFPIHQRLPNPVRHGIIGNIFYHD

SEQ ID NO: 9131 - protein, 834 aa, synthetic construct
  REGION 1..834: note = Synthetic
MKFNISTNADPFLTGLVFGFDVGTGSIGYAVRRGSTFLPDGVGVLICDSEGSKLDERRNFRRQRRTLRSKKFRRVWFAKELATILGLELHKDGNHETTLPKTSWSKNAHGGWTPNPSFENLLEPITLRLRALNGEKLKPEELHAALTHLFKRRGYEKDIPWANKEKDTKAQKENDAEEWGSGTVPPEKVQSEFDASGCKYPCEFLAQNPKHQRRRVWPRALLEKEFHAIANSQTENKNFPQLTEKTNWLLYGETKELKGHHVYFKTTEARNPGVLGLRWPRFDNRGPALDSLQPVDEQGRPLHVVRKNKETFRKAQWELALINFRVIDRATGNLVRPDDKSLTRLREIWESGKRKKKKESGSNAAESEIIKISEPVLKRWAKDFAGQYKLVDGQQPLTPQTGAGRARYSSPTLERIIAGEQFNPPQPLLRRKNESAEQAFNRYMADIKHPLVRHRLTLFQKLLQQLVSRFGEPDMIVLEAIRSLAMGEKKRREHIQRIKENRDERESIRTELKKDNFSSSKNSILRYRLFKEAKGRCPFCLCPFCLQQVVYKEAEIEHLVPRSRVDCNEFYNLTVAHQECNKEKDNRTPWEAYGTTKDWEALRKNAEDCFGLGSLKYRLFTNPDAQNLVEEKSDLQHTAYIARVIRQVSLIQLGWLAEDGRDATGLKDPEMTAWRFQVTNGSLTSRLRKSWGLNQILNPFPSKEIWEAMTPDEQEKRKTEMQEKNRGDLRHHSLDAMVIACTLPWLAHRTHGATDSFGRPGWWWLDEKKRSRASNPLFPNEGQMYDVVKKEIEKVVVKHHVSRSNHQRTYDTTIYGRPKRNGVPIRDCYVSREP

SEQ ID NO: 9132 - protein, 1080 aa, synthetic construct
  REGION 1..1080: note = Synthetic
MKFNISTNADPFLTGLVFGFDVGTGSIGYAVRRGSTFLPDGVGVLICDSEGSKLDERRNFRRQRRTLRSKKFRRVWFAKELATILGLELHKDGNHETTLPKTSWSKNAHGGWTPNPSFENLLEPITLRLRALNGEKLKPEELHAALTHLFKRRGYEKDIPWANKEKDTKAQKENDAEEWGSGTVPPEKVQSEFDASGCKYPCEFLAQNPKHQRRRVWPRALLEKEFHAIANSQTENKNFPQLTEKTNWLLYGETKELKGHHVYFKTTEARNPGVLGLRWPRFDNRGPALDSLQPVDEQGRPLHVVRKNKETFRKAQWELALINFRVIDRATGNLVRPDDKSLTRLREIWESGKRKKKKESGSNAAESEIIKISEPVLKRWAKDFAGQYKLVDGQQPLTPQTGAGRARYSSPTLERIIAGEQFNPPQPLLRRKNESAEQALNRYMADIKHPLVRHRLTLFQKLLQQLVSRFGEPDMIVLEAIRSLAMGEKKRREHIQRIKENRDERESIRTELKKDNFSSSKNSILRYRLFKEAKGRCPFCLCPFCLQQVVYKEAEIEHLVPRSRVDCNEFYNLTVAHQECNKEKDNRTPWEAYGTTKDWEALRKNAEDCFGLGSLKYRLFTNPDAQNLVEEKSDLQHTAYIARVIRQVSLIQLGWLAEDGRDATGLKDPEMTAWRFQVTNGSLTSRLRKSWGLNQILNPFPSKEIWEAMTPDEQEKRKTEMQEKNRGDLRHHSLDAMVIACTLPWLAHRTHGATDSFGRLGWWWLDEKKRSRASNPLFPNEGQMYDVVKKEIEKVVVKHHVSRSNHQRTYDTTIYGRPKRNGVPIRDCYVSREPIIVLKPADLKSPKTGKSKIFPPELGDYLASAWEKYCETEPEWEKQIKANNKCLPEAFQKRLCFSDFQQWRADGAPAFIWPKQVKIPIKRVGYIGVEDDSAVAPASPGTKGFVARGSFREVRLHPSEDGKSLVPVFVPLWRLDKPIPKAPIKTDSESVAVIRRGQTVEIKNSPGRNTPVGKYRVASTMQQNIKLLPVYLADIKEALKASGFLENGVNISWDTFIKSAGYELPHPPPVKPQPASAAEA

SEQ ID NO: 9133 - protein, 739 aa, synthetic construct
  REGION 1..739: note = Synthetic
MKFNISTNTDPFLTGLGFGFDVGTGSIGYAVRRGSTFLPDGVGVLICDSEGSNLEERRNFRRQRRTLRSKKFRRQWFAKELVKLGLPKPTKEQLKRANNETNEQFDQRTNPVSLRVRALNEPLEKWQLFIALTHLFKRRGYEKDVPWANKEKDTKANKENDAEEWGSGTVPPEKVQSEFDASGCKYPCEFLARNPKHQRRRVWPRALLENEFHAIAKAQTENKIFPQLTEKTNWLLYGETKEVKGHHVYFKTTEAQNPGVLGLRWPRFDNRGPALDSLQPLDEQGRPLHVVRKNKETFRKAQWELALINFRVIDRATGNLVRPDDKSLTRLREIWESGKRKKKKESGSNAAESEIIKISEPVLKRWAKDFAGQYKLVDGQQPLTPQTGAGRARYSSPTLERIIAGEQFNPPQPLLRRKNESAEQALNRYMADIKHPLVRHRLTLFQKLLQQLVSRFGEPDMIVLEAIRSLAMGEKKRREHIQRIKENRDERESIRTELKKDNFSSSKNSILRYRLFKEAKGRCPFCLCPFCLQEVVYKEAEIEHIVPRSRVDCNEFYNLTVAHQECNKKKDSRTPWEAYGTTKDWEALRKNAEDCFGLGSLKYRLFTNPDAQNLVEEKSNLQHTAYIARVIRQVSLIQLGWLAEDGRDATGLKDPEMTAWRFQVTNGSLTSRLRKSWGLNQILNPFPSKDAWEAMTPEEQEKKKTEMQEKNRGDLRHHSLDAMVIACTLPWLAHRTHGA

SEQ ID NO: 9134 - protein, 726 aa, synthetic construct
  REGION 1..726: note = Synthetic
MKFNISTNTDPFLTGLVFGFDVGTGSIGYAVRRGSTFLPDGVGVLICDSEGSKLDERRNFRRQRRTLRSKKFRRQWFAKELVKLGLPKPTKEQLKRANNETNEQFDQRTNPVSLRVRALNEPLEKWQLFIALTHLFKRRGYEKDVPWANKEKNTKANKENDAEEWGSGTLPPEKVQSEFDASGCKYPCEFLARNPKHQRRRVWPRVLLENEFHAIAKAQTENKNFPQLTEKTNWLLYGETKEVKGHHVYFKTTEAQNPGVLGLRWPRFDNRGPALDSLQPLDEQGRPLHVVRKNKETFRKAQWELALINFRVIDRATGNLVRPDDKSLTRLREIWESGKRKKKKESGSNAAESEIIKISEPVLKRWAKDFAGQYKLVDGQQPLTPQTGAGRARYSSPTLERIIAGEQFNPPQPLLRRKNESAEQALNRYMADIKHPLVRHRLTLFQKLLQQLVSRFGEPDMIVLEAIRSLAMGEKKRREHIQRIKENRDERESIRTELKKDNFSSSKNSILRYRLFKEAKGRCPFCLCPFCLQEVVYKEAEIEHIVPRSRVDCNEFYNLTVAHQECNKKKDSRTPWEAYGTTKDWEALRKNAEDCFGLGSLKYRLFTNPDAQNLVEEKSNLQHTAYIARVIRQVSLIQLGWLAEDGRDATGLKDPEMTAWRFQVTNGSLTSRLRKSWGLNQILNPFPSKDAWEAMTPEEQEKKKTEMQEKNRGDLRHHSLDAMVIA

SEQ ID NO: 9135 - protein, 577 aa, synthetic construct
  REGION 1..577: note = Synthetic
MKFNISNTDPFLTGLVFGFDVGTGSIGYAVRRGSTFLPDGVGVLICDSEGSKLDERRNFRRQRRTLRSKKFRRQWFAKELVKLGLPKPTKEQLKRANNETNEQFDQRTNPVSLRVRALNEPLEKWQLFIALTHLFKRRGYEKDVPWANKEKDTKANKENDAEEWGSGTVPPEKVQSEFDASGCKYPCEFLARNPKHQRRRVWPRVLLENEFHAIAKAQTENKNFPQLTEKTNWLLYGETKEVKGHHVYFKTTEAQNPGVLGLRWPRFDNRGPALDSLQPLDEQGRPLHVVRKNKETFRKAQWELALINFRVIDRATGNLVRPDDKSLTRLREIWESGKRKKKKESGSNAAESEIIKISEPVLKRWAKDFAGQYKLVDGQQPLTPQTGAGRARYSSPTLERIIAGEQFNPPQPLLRRKNESAEQALNRYMADIKHPLVRHRLTLFQKLLQQLVSRFGEPDMIVLEAIRSLAMGEKKRREHIQRIKENRDERESIRTELKKDNFSSSKNSILRYRLFKEAKGRCPFCLCPFCLQEVVYKEAEIEHIVPRSRVDCNEFYNLTVAHQECNKKKDSRTPWEA

SEQ ID NO: 9136 - protein, 572 aa, synthetic construct
  REGION 1..572: note = Synthetic
MKFNISTNTDPFLTGLVFGFDVGTGSIGYAVRRGSTFLPDGVGVLICDSEGSKLDERRNFRRQRRTLRSKKFRRQWFAKELVKLGLPKPTKEQLKRANNETNEQFDQRTNPVSLRVRALNEPLEKWQLFIALTHLFKRRGYEKDVPWANKEKDTKANKENDAEEWGSGTVPPEKVQSEFDASGCKYPCEFLARNPKHQRRRVWPRVLLENEFHAIAKAQTENKNFPQLTEKTNWLLYGETKEVKGHHVYFKTTEAQNPGVLGLRWPRFDNRGPALDSLQPLDEQGRPLHVVRKNKETFRKAQWELALINFRVIDRATGNLVRPDDKSLTRLREIWESGKRKKKKESGSNAAESEIIKISEPVLKRWAKDFAGQYKLVDGQQPLTPQTGAGRARYSSPTLERIIAGEQFNPPQPLLRRKNESAEQALNRYMADIKHPLVRHRLTLFQKLLQQLVSRFGEPDMIVLEAIRSLAMGEKKRREHIQRIKENRDERESIRTELKKDNFSSSKNSILRYRLFKEAKGRCPFCLCPFCLQEVVYKEAEIEHIVPRSRVDCNEFYNLTVAHQECNKKKDS

SEQ ID NO: 9137 - protein, 530 aa, synthetic construct
  REGION 1..530: note = Synthetic
MKFNISTNTDPFLTGLVFGFDVGTGSIGYAVRRGSTFLPDGVGVLICDSEGSKLDERRNFRRQRRTLRSKKFRRQWFAKELVKLGLPKPTKEQLKRANNETNEQFDQRTNPVSLRVRALNEPLEKWQLFIALTHLFKRRGYEKDVPWANKEKDTKANKENDAEEWGCGTVPPEKVQSEFDASGCKYPCEFLARNPKHQRRRVWPRVLLENEFHAIAKAQTENKNFPQLTEKTNWLLYGETKEVKGHHVYFKTTEAQNPGVLGLRWPRFDNRGPALDSLQPLDEQGRPLHVVRKNKETFRKAQWELALINFRVIDRATGNLVRPDDKSLTRLREIWESGKRKKKKESGSNAAESEIIKISEPVLKRWAKDFAGQYKLVDGQQPLTPQTGAGRARYSSPTLERIIAGEQFNPPQPLLRRKNESAEQALNRYMADIKHPLVRHRLTLFQKLLQQLVSRFGEPDMIVLEAIRSLAMGEKKRREHIQRIKENRDERESIRTELKKDNFSSSKNSILRYRLFKEAKGRCPFCLCPF

SEQ ID NO: 9138 - protein, 640 aa, synthetic construct
  REGION 1..640: note = Synthetic
MKFNISTNTDPFLTGLVFGFDVGTGSIGYAVRRGSTFLPDGVGVLICDSEGSKLDERRNFRRQRRTLRSKKFRRQWFAKELVKLGLPKPTKEQLKRANNETNEQFDQRTNPVSLRVRALNEPLEKWQLFIALTHLFKRRGYEKDVPWANKEKDTKANKENDAEEWGSGTLPPEKVQSEFDASGCKYPCEFLARNPKHQRRRVWPRVLLENEFHAIAKAQTENKNFPQLTEKTNWLLYGETKEVKGHHVYFKTTEAQNPGVLGLRWPRFDNRGPALDSLQPLDEQGRPLHVVRKNKETFRKAQWELALINFRVIDRATGNLVRPDDKSLTRLREIWESGKRKKKKESGSNAAESEIIKISEPVLKRWAKDFAGQYKLVDGQQPLTPQTGAGRARYSSPTLERIIAGEQFNPPQPLLRRKNESAEQALNRYMADIKHPLVRHRLTLFQKLLQQLASRFGEPDMIVLEAIRSLAMGEKKRREHIQRIKENRDERESIRTELKKDNFSSSKNSILRYRLFKEAKGRCPFCLCPFCLQEVVYKEAEIEHIVPRSRVDCNEFYNLTVAHQECNKKKDSRTPWEAYGTTKDWEALRKNAEDCFGLGSLKYRLFTNPDAQNLVEEKSDLQHTAYIARVIRQVSLIQLG

SEQ ID NO: 9139 - protein, 493 aa, synthetic construct
  REGION 1..493: note = Synthetic
MKFNISTNTDPFLTGLVFGFDVGTGSIGYAVRRGSTFLPDGVGVLICDSEGSKLDERRNFRRQRRTLRSKKFRRQWFAKELVKLGLPKPTKEQLKRANNETNEQFDQRTNPVSLRVRALNEPLEKWQLFIALTHLFKRRGYEKDVPWANKEKDTKANKENDAEEWGSGTVPPEKVQSEFDASGCKYPCEFLARNPKHQRRRVWPRVLLENEFHAIAKAQTENKNFPQLTEKTNWLLYGETKEVKGHHVYFKTTEAQNPGVLGLRWPRFDNRGPALDSLQPLDEQGRPLHVVRKNKETFRKAQWELALINFRVIDRATGNLVRPDDKSLTRLREIWESGKRKKKKESGSNAAESEIIKISEPVLKRWAKDFAGQYKLVDGQQPLTPQTGAGRARYSSPTLERIIAGEQFNPPQPLLRRKNESAEQALNRYMADIKHPLVRHRLTLFQKLLQQLASRFGEPDMIVLEAIRSLAMGEKKRREHIQRIKENRDERES

SEQ ID NO: 9140 - protein, 796 aa, synthetic construct
  REGION 1..796: note = Synthetic
MKFNISNTDPFLTGLVFGFDVGTGSIGYAVRRGSTFLPDGVGVLICDSEGSKLDERRNFRRQRRTLRSKKFRRQWFAKELVKLGLPKPTKEQLKRANNETNEQFDQRTNPVSLRVRALNEPLEKWQLFIALTHLFKRRGYEKDVPWANKEKDTKANKENDAEEWGSGTVPPEKVQSEFDASGCKYPCEFLARNPKHQRRRVWPRVLLENEFHAIAKAQTENKNFPQLTEKTNWLLYGETKEVKGHHVYFKTTEAQNPGVLGLRWPRFDNRGPALDSLQPLDEQGRPLHVVRKNKETFRKAQWELALINFRVIDRATGNLVRPDDKSLTRLREIWESGKRKKKKESGSNAAESEIIKISEPVLKRWAKDFAGQYKLVDGQQPLTPQTGAGRARYSSPTLERIIAGEQFNPPQPLLRRKNESAEQALNRYMADIKHPLVRHRLTLFQKLLQQLVSRFGEPDMIVLEAIRSLAMGEKKRREHIQRIKENRDERESIRTELKKDNFSSSKNSILRYRLFKEAKGRCPFCLCPFCLQEVVYKEAEIEHIVPRSRVDCNEFYNLTVAHQECNKKKDSRTPWEAYGTTKDWEALRKNAEDCFGLGSLKYRLFTNPDAQNLVEEKSDLQHTAYIARVIRQVSLIQLGWLAEDGRDATGLKDPEMTAWRFQVTNGSLTSRLRKSWGLNQILNPFPSKDAWEAMTPEEQEKKKTEMQEKNRGDLRHHSLDAMVIACTLPWLAHRTHGAKDSFGRPGWWWLDEKKRSQASNPIFPKEGQMHEVVKKEIEKVLVRHHVSRSNHQQSYA

SEQ ID NO: 9141 - protein, 1053 aa, synthetic construct
  REGION 1..1053: note = Synthetic
MKFNISTNTDPFLTGLVFGFDVGTGSIGYAVRRGSTFLPDGVGVLICDSEGSKLDERRNFRRQRRTLRSKKFRRQWFAKELVKLGLPKPTKEQLKRANNETNEQFDQRTNPVSLRVRALNEPLEKWQLFIALTHLFKRRGYEKDVPWANKEKDTKANKENDAEEWGSGTVPPEKVQSEFDASGCKYPCEFLARNPKHQRRRVWPRVLLENEFHAIAKAQTENKNFPQLTEKTNWLLYGETKEVKGHHVYFKTTEAQNPGVLGLRWPRFDNRGPALDSLQPLDEQGRPLHVVRKNKETFRKAQWELALINFRVIDRATGNLVRPDDKSLTRLREIWESGKRKKKKESGSNAAESEIIKISEPVLKRWAKDFAGQYKLVDGQQPLTPQTGAGRARYSSPTLERIIAGEQFNPPQPLLRRKNESAEQALNRYMADIKHPLVRHRLTLFQKLLQQLVSRFGEPDMIVLEAIRSLAMGEKKRREHIQRIKENRDERESIRTELKKDNFSSSKNSILRYRLFKEAKGRCPFCLCPFCLQEVVYKEAEIEHIVPRSRVDCNEFYNLTVAHQECNKKKDSRTPWEAYGTTKDWEALRKNAEDCFGLGSLKYRLFTNPDAQNLVEEKSDLQHTAYIARVIRQVSLIQLGWLAEDGRDATGLKDPEMTAWRFQVTNGSLTSRLRKSWGLNQILNPFPSKDAWEAMTPEEQEKKKTEMQEKNRGDLRHHSLDAMVIACTLPWLAHRTHGAKDSFGRPGWWWLDEKKRSQASNPIFPKEGQMHEVVKKEIEKVLVRHHVSRSNHQQSYATTLYAKKAENKYVAREVFTSLTPKNLGNIWPDKFALYCEAAWRRYSDESANLEGELKKTKGNVPASFTNKLCFAHFQKWRADDCPEFYWPKEIKIPIRSVRLISVKDDTAVVPFSPGTHAYVKRTGFKEVQVFLAEDEKSFVPAFIPHWKSDKPICEKPIKADRKPIAVIRRGELVKLLKPTGPKNPPGAYRVSTTMQDNIQLIPAHIAKDKDALLASGFLANGVTISWKSFFAAVGYELPHPPSVKSQPPGAAEA

SEQ ID NO: 9142 - protein, 898 aa, synthetic construct
  REGION 1..898: note = Synthetic
MSKTNRSIDDFVSGLVFGFDVGTGSIGYAVREGDKFLDVGVLICDSEGSDLSKRRELRRQRRTLRSKKYRRQWFADELAKVGLLRPASSHDDPISLRLRALTGERLAPEKLHAALTHLFKRRGYQAPPWTNTPDGAEQGKVRRKKDDDEGIVKKQVAEMQEKLGNMHPCQFLTKERDAAGKSPTRHWARKIYWPREVLEKEFRAICAAQAANYPTLAGKVDWLLHGDTREIKGTHVFFKSTEGRNPGVLGLRWPRFDNRGPALDALRPVDGEGRTLHVVRKNKKSFADAQWELALMNFRVVDAATRQKIDPRGQFPGFIESLQNEWKKKGKVTIARLQRLAAPYAEKFLLIEDQKALTPETGAGRARYSTPTLETIRSEIAAGRRVEPPQPILKHDGEETEAARNRYLAEIKHPLVRHRLALFRELLAQLAKKYGQPNTIVVEAVRSLALGPKARSEANKRNEQFRKEREIARGDLTAAGKSASRKAITRYRLWKEAQSKCPFCGDPITQEQLLNGEADIEHLVPRSIVDCNELYNLTVGHIPCNREIKGDRTPYAAFSPDGEKWELLKSNAERCFKGRKLEIFLSPNAEELIEQKTDLQHTAYIARVIRGITLIELGWVGKDGRDPTIEKGNMPSSSFQVTNGQLTSRLRGAWGINQILHPLPAGKRWDDLNDAQKEQFTEKNRGDLRHHALDAMVISCTLPWLAHRTHGATDENGNHGWWTQDEKQRSKAANPVFPQAGQMHNVCEAEMETVTVRHHVSRSNHHEAYATTLYAKKAKDTYVAREVFTTLTPKNLGSIWPKEFAAYCEAAWMCYVEESSDVDMELRMTKGCVPESFTGKLCFSHFQQWRAGEAPSFVWPKQIKIPIRNVRLISVKDDGAVAPFSSGTHAYVKRTGFK

SEQ ID NO: 9143 - protein, 1042 aa, synthetic construct
  REGION 1..1042: note = Synthetic
MVRSFQTNNFINGLVFGFDVGTGSIGWAVRRGTEFLDVGVLICDSEGGDLSKRRELRRQRRTLRSRKYRRKWFATELERLGLLRPQNPLHDPVTLRFRALNGESLAPEELHSALTHLFKRRGYTEVPWANKPANEKENDPGKKEGLVKESVLEIQKKMAEANCQFPCQFLMKSREQAGKNPTEKWGRKIYWPRELLKNEFRAILTAQAGRFPKLAEKSDWLLYGDSQTKNSDGRIYHVFFKNTEARNPGVLGLRWPRFDNRGPALDTLQPVDEQGRPMHVVRKNKKSFINAQWELALMNFRVTERATGKLVVPDSKSLVRLREIWETRKRGKKEIAVTPEDPKSIKISERILKKWVKEFNEQYTLIENQPPLTPQTSAGRARYSSPTLNRIAGGERFDPPQPILRRQGENTEQALNRYLADIKHPLVRHRLILFRRLLAQLISRHGKPDMLILEAVRSLALGPKAKNEMNKRNEEFRKQREIARADLAANRESASRQAILRYRLWYEAKGRCPLCLETIARTDLGHGADIAHLVPRSRVDCNEMYNLTVTHIKCNRDIQGDRTPYAAFSHTEIWENIKTNAELCFSKIRVNKDHTKAELFISPNAEELIEQKADLQHTAYIARVIRHVSLIQLGWLSEDGHDPTMEQGNKPSSCFQVTNGSLTSRLRQAWGLNRILHPLPAGKRWEDLTEEEQRVFQEKNRGDLRHHALDAMVIACTLPWLAHRTHGATDELGNHGWWTQDEKRRSKAANHLFPLGGQMYEVCKGWIDKVVVRQHASRSNHRKAYNTTLYSKKADNTYVARKPFTSLTPKNLHSIWPKEFAAYCDAAWKRYVTESSGIDGELKKTRGCLPDAFTRKLCFSHFQKWHAVGAQELAWPQQVKIPIRSVKLISVKDDTAVTPFSSGTHAFVERHGFKEVRIHIAEDGKSFVPVFIPYWKGDRPLCEKPIKAGSSPVAVIRLGQPVEIKYSPGQNAPKGKYRVASTMQANIKLLPVYLADNKEALKAAGYLENGVNIGWNSFIKAVGYELPHCSSDQAESAGAAPA

SEQ ID NO: 9144 - protein, 1052 aa, synthetic construct
  REGION 1..1052: note = Synthetic
MNPSKFSIPDFCSGLVFGFDVGTGSIGYAVRKGSQFLDVGVLICPEDTNDLSGRRGLRHQRRTLRSRKRRRQWFAKELEKLGLPRPQKPTHDPITLRVRALNGEGLRPDDLHAALAHLFKRRGYSNVPWASGESAAREKQSLKKEEEGEIKKAVAEIRRLVSESGCQYPCQFLAKRREEVGRSPTEKWARKIYWPREMLRDEFLAILKTQERRFPKLAEKADWLLFGDTREVKGCHVFFNATDSRNPGVLGLRWPRFDNRSPALDSFQPVDEQGRSRHVVRKSKDAFTKAQWELALMNFRVLDAATRQKLDPRTCFPVLIENLRNEWSKKGKVTAACLEKLAEPFKDKFLLIEGQKPLTPETGAGRSRYSSPTLEMIRSEIGAGRRVDPPQPLLRREGESADDALNRYLADIKHPLVRHRLVLFRRLLARLAARFGPPDMIVLEAVRSLALGQRAKNELSKRNEQFRKEREVARDQLSSIGESISRKAIQRYRLWQEAKHRCPFCLEDIERADLGNGADTEHLVPRSIVDCNEFYNLTVAHLKCNRELKGERTPFGAFHGTAQWSDIKANAEQTFSGRKLEIFLSPNAAEVIEQKADLQHTAYIARAIRHVALVQLGWLSNEGRDPTPEKQNSALCFQVTNGQLTSRLRRAWGLNQILHPLPPEKRWDELTVGEQEQLSEKNRGDLRHHALDAMVIACTLPWLAHRTHGATDELGNRGWWTQNEKLRSTAANPVFPREGQLHDVAEREIGKVVVQHHVSRSNHQQGYATTLYSKKAKDTYVAREVFTALTPRNLGSIWPKKFAAYCESAWARYAVESPDIDAELKTNKGCVPSSFTSKLCFAHFQQWRAEHAPPFTWPKRIKIPIRNVRLISVKDDRAVVPSSRGTHAYVKRTGFKEVRIYPAEDGKSFVPVFVPYFKADKPATERPIRPGARHVAVIRKGQIVKLEKPLAAGAPAGSYRVLVIAQEYVKLLPPHVANKVEAKLAFRLPKSGLQPKWPEFIRCLGHELPHFYSAQPQSPATSEVQRPVGQIAVVRSQHRGETEKMPKQMTFF

SEQ ID NO: 9145 - protein, 1020 aa, synthetic construct
  REGION 1..1020: note = Synthetic
MIVSKNKFIEGLIFGFDVGTGSIGYAIRKGREFKDVGVIICPDETNDLSKRRALRRQRRTIRSRKYRHQWFSQELEKLGLPKPVQSPHDPISLRVRALNAEVLVPEELHAALTHLFKRRGYCKVPWANSETRRKDGNAEKEEGKIKEAVAEIAKSLNGRHPCQYLAELRKEVGKSPKDHWARKIYWPRELLEQEFRAILKAQEKQWPNLAIKADWLLYGDTQPKRKNDVIYHVFFKASDSRNPGALGLRWPRFDNRGPALDSFQPVDWQGRPLHVVRKAKTSYRNAQWELAVMNFRVLDAHTRQKVDPCVLFPEFINDLRNEWNRKGKITLAKLKKMAEPFKGKFLLIDAQTPLTPETGRGRARYSTPTLNRIRQEIAAGKRIDPPQPILLRNGESADAALNRYLSDIKHPLVRHRLVLFRRLLTQLVAQYGQPDMVIVEAIRNLALGQKAKNEINRRNEEYRRQRETARENLSANQESISRQAIRRYRLWQEAKCRCPFCLQMIERSELGHGADIEHLVPRAIVDCNEFFNLTVAHIQCNRELKGERTPYEAFGGSSQWADIKDNAEKIFNGRKLEIFLSPNAAELIEQKADLQHTAYIARVIRHIVMIQLGWVGEDGRDPTPEKQNAALAFQVTNGQLTSRLRRAWGLNQLLHPLQNGKRWDELTEAEQTQFTEKNRGDLRHHALDAMVIACTLPWLAHRTQGATDEFGNHGWWTQDEKQRSKAANPIFPREGQMHEVVNRWVNKIVVQHHVSRSNHRQAYATTLYSRKASGIYVAREVFTTLTPKNLGSIWPEELAKYSIAAWSRYKDESPNIDAELEKTKGYLPTSFTEKLCFSHFQRWRAGGAPSFDWPRQIKIPIRSVRLISVKDDTTVVPFSPGTRAFVKRTEFKEVCIYLAEDGKSFVPVFIPYWKNDKPINNRQINIAKKPIARIRRGMIIELIKSTGPNNPAGRYRVSSTMQKQIQLIPAHIADNEDALCASGYLANGVNIRWHTFLHAAGYELPHPPSAKPKSARAAEA

SEQ ID NO: 9146 - protein, 1022 aa, synthetic construct
  REGION 1..1022: note = Synthetic
VDADSHSVLSPTNFLTGLVFGFDVGTGSIGYAVRKGSKFKDVGVLICPEDTNDLSGRRGLRRQRRTLRSRKYRRQWFAGELTKLGLPKPVQPPNDPISLRLRALSGNELRPEELHAALTHLFKRRGYSKVPWANREAASKESDKDKEEGVVKEKVKELLEKLGGLLPCQFLAKRHEEVGASPTENWARKIYWPRELLEQEFRAILRAQENRFPQLGAKVDWLLYGDTREVKGFHVFFNAFGSRDPGVLGLRWPRFDNRGPALDSFQPIDEQGHPLHVVRKSKATFAKAQWELALMNFRVLDASTRQKLDPRIHFPVFIENLRNEWNKKGKITAARLIKLADAFKDKFLLIEGQKPLTPETGSGRARYSSPTLEFIRQEVAAGKRVDPPQPVLRRKGESAAVALNRYLADIKHPLVRHRLVLFRRLLDQLISQFGEPEVIVLEAVRTLALGQKTKNELNKRNEEFRKQRANAREDLSANNESTSRKAIQRYRLWQETKGRCPFCLETIERTDLGHGADIEHLVPRSIVDCNEFFNLTVAHIKCNRELKKEGTPFAAFSDTSRWTDIRDFAEKTFTGRKLEIFLSPKAEELIEQKADLQHTAYIARVIRHVALIQLGWLGEDGRDPTPERQNPALRFQVTNGQLTSRLRKAWGLNQILQPLPNGKRWDELSEEEQRLFSEKNRGDLRHHALDAMVIACTLPWLAHRTYGAKDEFGNHGWWTQDEKQRSKAANPVLPGEGQMHEVAKLEIERVVVRRHVSRSNHQQAYATTLYAKKAKDTYVAREVFTTLTPKNLGSIWPKEFAAYCEAAWARYAEESPNIDGELKGTKGCIPANFTRKLCFSHFQQWRADNAPNFVWPGTVKIPIRSVKLISVKDDTTVVPFSPGTHAYVKRKTYKEVRILVSADCKKFVPVLVPYWRKDRPVCNEPVNSKLGTVAIIRKGQKVELKKPLAAGYKPGRYTVTDFGQVQVIILPDHIADNDDARLGFGLPRTGIKPRWHEFISCLGYELPHPPPAQPQSSRPAEA

SEQ ID NO: 9147 - protein, 934 aa, synthetic construct
  REGION 1..934: note = Synthetic
VDADSHSVLSPTNFLTGLVFGFDVGTGSIGYAVRKGSKFKDVGVLICPEDTNDLSGRRGLRRQRRTLRSRKYRRQWFAGELTKLGLPKPVQPPNDPISLRLRALSGNELRPEELHAALTHLFKRRGYSKVPWANREAASKESDKDKEEGVVKEKVKELLEKLGGLLPCQFLAKRHEEVGASPTENWARKIYWPRELLEQEFRAILRAQENRFPQLGAKVDWLLYGDTREVKGFHVFFNAFGSRDPGVLGLRWPRFDNRGPALDSFQPIDEQGHPLHVVRKSKATFAKAQWELALMNFRVLDASTRQKLDPRIHFPVFIENLRNEWNKKGKITAARLIKLADAFKDKFLLIEGQKPLTPETGSGRARYSSPTLEFIRQEVAAGKRVDPPQPVLRRKGESAAVALNRYLADIKHPLVRHRLVLFRRLLDQLISQFGEPEVIVLEAVRTLALGQKTKNELNKRNEEFRKQRANAREDLSANNESTSRKAIQRYRLWQETKGRCPFCLETIERTDLGHGADIEHLVPRSIVDCNEFFNLTVAHIKCNRELKKEGTPFAAFSDTSRWTDIRDFAEKTFTGRKLEIFLSPKAEELIEQKADLQHTAYIARVIRHVALIQLGWLGEDGRDPTPERQNPALRFQVTNGQLTSRLRKAWGLNQILQPLPNGKRWDELSEEEQRLFSEKNRGDLRHHALDAMVIACTLPWLAHRTYGAKDEFGNHGWWTQDEKQRSKAANPVLPGEGQMHEVAKLEIERVVVRRHVSRSNHQQAYATTLYAKKAKDTYVAREVFTTLTPKNLGSIWPKEFAAYCEAAWARYAEESPNIDGELKGTKGCIPANFTRKLCFSHFQQWRADNAPNFVWPGTVKIHIRSVKLSSVKDDTTVVPFSPGTHDYVKRKTYKEVRILVSADCKKFVPVLVPYWRKDRPVCNEPVNSKLGTVA

SEQ ID NO: 9148 - protein, 730 aa, synthetic construct
  REGION 1..730: note = Synthetic
TGSIGYAVRRGTGFRDVGVLICPEETNDLSSRRGLRRQRRTLRSRKYRRQWFAQELEKLGLPKPAQPFHDPISLRLRAVHGEKLQPEEVYAALTHLFKRRGYTEVPWANREASSKESDKDKEEGVIREKIKELRKKLGGMLPCQFLGARRKEVGTSPTENWARKIYWPREALRDEFLAITSAQKEHFPKLAANADWLLYGDTQPKRKNGQTYHVFFNSSGSRNPGVLGLRWPRFDNRGPALDSFQPLDAQGRPLHVVRKNKEAFTKAQWELAVMNFRVLDVTTRQNFDPRIRFPVFIENLRNEWNKKGKVTAARLIKLAEPFRDKFLLVEDQKPLTPETGSGRARYSSPTLEIIQRDIAAGKRVDPPQPILRRKGESADAALNRYLADIKHPLVRHRLVLFRRLLAQLVSQFGKPDMVILEAVRSLALGQKAKNEINKRNEEFRKQRENARANLSANNESTSRKAIQRYRLWQEAKGRCPFCLQTIERTDLGHGADIEHLVPRSVVDCNEFFNLTVAHIKCNRELKAERTPFAAFGGASHWTDIKDNAEKTFQGRKLEIFLSPNAEELIEQKADLQHTAYIARVIRHIALIQLDWLGEDGRDPTPEKQNTALAFQVTNGQLTSRLRKAWGLNQILHPLPDGTRWDELTETEQKQFTEKNRGDLRHHALDAMVIACTLPWLAHRTYGATDAFGNHGWWTQDEKQRSKAVNPIFPREGQMHDVVKREIEKAV

SEQ ID NO: 9149 - protein, 896 aa, synthetic construct
  REGION 1..896: note = Synthetic
MAAIFSGNRFIDGLVFGFDVGTGSIGYAVRRGTGFRDVGVLICPEETNDLSSRRGLRRQRRTLRSRKYRRQWFAQELEKLGLPKPAQPCHDPISLRLRAVNGEKLRPEELYAALTHLFKRRGYTEVPWANREASSKESDKDNEEGVIREKIKELRKKLGGMLPCQFLAARRKEVGTSPTENWARKIYWPREALRDEFLAITSAQKEHFPKLAANADWLLYGDTQPKRKNGQTYHVFFNSSGSRNPGVLGLRWPRFDNRGPALDSFQPLDAQGRPLHVVRKNKEAFTKAQWELAVMNFRVLDVTTRQKLDPRIRFPVFIENLRNEWNKKGKVTAARLVKLAEPFKDKFLLIEDQKPLTPETGSGRARYSSPTLEIIRRDIADGKRVDPPQPILRREGESADAALNRYLADIKHPLVRHRLVLVRRLLAKLVSQFGKPDMVILEAVRSLALGQKAKNEINKRNEEFRKQRENARDDLSANNESTSRKAIQRYRLWQETKGRCPFCLQTIERTDLGHGADIEHLVPRSVVDCNEFFNLTVAHIKCNRELKAERTPFAAFGGASHWTDIKDNAEKTFQGRKLEIFLSPNAEELIEQKADLQHTAYIARVIRHIALIQLDWLGEDGRDPTPEKQNTALAFQVTNGQLTSRLRKAWGLNQILHPLPDGTRWDELTETEQKQFTEKNRGDLRHHALDAMVIACTLPWLAHRTYGATDAFGNHGWWTQDEKQRSKAVNPIFPREGQMHDVVEREIEKVAVRHHVSRSNHQQAYATTLYAKKGKNTYVAREVFTTLTPKNLGSIWPREFAAYCEAAWLRYVEESPDIDAELKKTKGCLPANFTSKLCFSHFQQWRADTAPSFAWPKQVRIPIRSVRLISVKDDTAVVPFSPGTHAYVKRTGFKEV

SEQ ID NO: 9150 - protein, 1032 aa, synthetic construct
  REGION 1..1032: note = Synthetic
MKVTLSSDSFLKGLVFGFDVGTGSIGYAVRKGADFKDVGVLICESEGSDLRQRRDLRRQRRTLRSRKYRRQWFAKELMNLGLPRPEQPPHDPISLRLRALNGDPLKPEELHAALAHLFKRRGYSKVPWANVEKTAKENAKPKKNDEEGEIKKAVEGIRKEMDEKKCEFPCQLLEARRKEAGTSPDKEWGRKIYWPRDLLEKELRAIAAAQKERFPALIEKADWLLYGDAKEVKGHRVFFKTTEARNPGVLGVRWPRFDNRGPALDSLQPVDEQGRPLHVVRKNKEAFTKAQWELALMNFRVLDAKTRQRIDPRIHFPIFIENLRNEWNKRGKVTEARLKKLAEPFADKFLLIEDQKPLTPETGAGRARYSSPTLELIRKRIDEGGRVDPPQPVLRREGEIAEQALNRYLADIRHPLVRHRLVLFRGILRQLVKDYGQPNMIVLEAVRSLAMDKKSEKYKEMLRRNEIFRKDRVDAREELSANQESTSRRAIQRYRLWKEAKGRCPFCLETIARTDLGHRADIEHIVPRALVDCSEWYNLTVAHLKCNRELKGNQTPFAAFANTANWEAIKKNAEDCFKNAHLNRDCTKADFFVSPQAEEMIEQKSDIQHTAYIARLIRHVSLIQLGWLNDQGRDPTPEKQNPALSFQVTNGQLTSRLRKAWGLNQILHPLPPGMKWEDLSEEEQKQFTEKNRGDLRHHALDAMVIACTLPWLAHRTHGATDELGNHGWWTQDEKQRSKTANPIFGDQMHDMVKREIASVVVRPHVSRSNHGKKLDTTPLSLRVIEGKKEVFVARRPLREKSPESIRDIFSAHLKNYIATEWASWAEANPDWDKENKGPNKGRFPERFIRQLVDPIWKKPVRSVKFIVERSRSSVFKVGVHPSGNRRDIFVAYGENKEVRVYKLATGSGFVAQAIRPCYANGESPARPPQAGELAFVVRRGTLFRLNNAFKIGKQELPPGIYKVVALPGEADGRVSFFPHFQSTSSKDGKRLQPIRADIEKIAAHIDMLSNKGTRELPHPPSVKPQPESPHQA

SEQ ID NO: 9151 - protein, 1025 aa, synthetic construct
  REGION 1..1025: note = Synthetic
MDTNRSLVRRSDFLAALVFGFDVGSGSIGYAVRRGTEFLDVGVLICPEETNDLSGRRGLRRQRRTLRSRKYRRKWFAQELEKLGLPQPKNPTQHPISLRVRALNGEELRAEELHAALTHLFKRRGYSKVPWANREATSSKESEKDKEEGIIKEKVKDLREKLGELLPCQFLAKRRVEVGTSPMESWARKIYWPRELLEQEFRAILKAQENRFPKLAMNADWLLYGDTHVKRKNDETYHVFFNASGSRNPGVVGVRWPRFDNRGPALDSFQPFDNQGRLLHVVRKNKEAFAKAQWELALMNFRVLDTNTRQKLDPRIRFPIFIEHLRNEWNKKGRVTWARLVRLAEPFKEKFLLVENQKPLTPETGKGRARYSSLTLEIIRREIAAGKRVEPPQPILRRKGENADAALSRYLADIKHPLVRHRLVLFRRLLAQLVSKFGMPDLIVLEAVRSLALGQKNKNELNKRNEEFRQQRENAREDLSANNESISRKAIQRYRLWQEAKSRCPFCLQTIERTDLGHGADIEHLVPRSIVDCNEFYNLTVAHIKCNRELKRERTPFAAFGGTSHWPAIKNNAARTFSGRKLEIFLSPTAEELIEQKADLQHTAYIARVIRHISLIQLGWLNDAGRDPTPEKQNSALRFQVTNGQLTSRLRKAWGLNHILHPLPNAKRWHELSAEEQKQFSEKNRGDLRHHALDAMVIACTLPWLAHRTHGAKDEFGNHGWWTQDEKQRSKAANPIFPREGQMHEVVQREIQKVVVRHHVSRSNHKRAYDTTIYGRKATNVYVAREKLPDLKEKDFGNIYPETLGSYLFAAWERFQEETPTLADMLKKTKGKLPDQFIGRLCFSHFQSWREDKAPPFNWPKRVQIPIRSVRFVGVRDDKAVAPASPGTRGFVARRGYKEVRIHVSVDGKNYVPVFVPYWKSDRLIHDHSYQAKPPIQVIKLGDLIHLKSGYGPNNPPGVYRVASTMQKQIQLLPPYIADTKEALKASGFLENGVNLRWPAFFKAAGYELSHSSSAESQSTSAVEV

SEQ ID NO: 9152 - protein, 823 aa, synthetic construct
  REGION 1..823: note = Synthetic
EVLRDEFLAIAAAQKKNFPKLAEKTDWLLYGDSQPKKKGEVTYHVFFKTTEARNPGILGLRWPRFDNRGPALDSLLPVDEQGRPLHVVRKNKEAFNKAQWELALMNFRVVDTNTRQKIDPRIHFPIFIENLRNEWNKKGKVTEARLKKLAQPFEAKFLLIEDQKPLTPETGTGRARYSSPTLELIRKKIDEGGRVDPPQPILRRKGESGEQALNRYLADIKHPLVRHRLVLFRGILRELVKDYGQPDMIVLEAVRSLALGQKAKNELNKRNEQFRKERENAREQLSSNNESFSRKAIQRYRLWQEAKGRCPFCLQTIERTDLGHGADIEHLVPRSVVDCNEFYNLTVAHIKCNRELKGDHTPLAAFGGTTQWEGIKANAENCFTGRKLEIFLSPNAEELIEQKSDLLHTAYIARVIRHISLIQLGWLNDEGRDPTPEKQNPALSFQVTNGQLTSRLRKAWGLNQILHPLPPGKRWDELTDEEQKQFTEKNRGDLRHHALDAMVIACTLPWLAHRTHGATDKFGRHGWWTQDEKYRSKAANPIFPNEGQMHDIVKQKIEKAAVRHHVSRSNHKRGYDTTIYGRKSANIYVAREKLTDLKEKDFSNIYPEILGVYVSAAWERFNNETGGLEEILKSTKGKLPANFVEKLCFSHFQQWRERKSGDFYWAKQVKIPIRSVKYVGVHDDKAVSKASPGTHGYVARGGFKEVRIYRSTDGKNWVPVFVPYWKGDRLIHEQPYQPGMPNKIIRIGDFIELPNGYGANNPPGIYRVVSTMQKQIQLMPPHIADTKEALKASGYLENGINLRWPAFFKATGYELPHPSSVKP

SEQ ID NO: 9153 - protein, 1035 aa, synthetic construct
  REGION 1..1035: note = Synthetic
MTAKGNPPDFLNGLVFGFDVGTGSIGYAVRNGAEFKDVGVLICPEDTNDLSGRRSMRRQRRTLRSKKYRRQWFARELEKLGLPIPTPPPHDPISLRVRALHGDSLKPAELHAVLAHLFKRRGYTEVPWATREAPAKESDKDKEEGVIKEKIKELREKVGGLLPCQFLAKRRDEAGRSPIEKWARKIYWPRELLEQEFRSIVEAQREHFPTLAEKADWLLYGDTQPKHRNGKTYHVFFNATGSRNPGVLGLRWPRFDNRGPALDSFQPVDEAGRPLHVVRKNKEAFTKTQWELALMNFRVLDANTRQKLDPRIHFPVFVENLRNEWSKKGKVTVARLAKLAGVFKDKFLLVENQKALTPESGGGRARYSSPTLEVIRQEIAAGNRVDPPQPNLKRPGESNDAALNRYLADIKHPLVRHRLVLFRQLLTQLVSKNGKPDMIVIEAVRSLALGPKAKNEMNKRNEEFRKQRENAREALSSNNESTSRKAIQRYRLWLEAKGRCPFCLETIERSDLGHGADIEHLVPRSVVDSNEFFNLTVAHNRCNRELKSDRTPYAAFAHTPRWVYIKDNAEKTFSGRKLEIFLSPKAEELIEQKADLQHTAYLARVIRHVSLIQLGWLGSEGRDPTPERMNPALAFQVTNGHLTSRLRKAWGLNQILHPLPQGKRWEDLTEAEQQQFTEKNRGDLRHHALDAMVIACTLPWLAHRTHGAQDEFGNHGWWTQDEKQRSKAANPVFPPEGQMHEVVKREIEKVVVRHHVSRSRNQRTYDTTIYGRPKKNGQVIANCYVSREPVTALRPEDLKSSKTGKSKIYPPELGEYLASAWEAYREVEPDWERQLKAAKNCLPEAFQKRLCFSDFQRWRAENAPTFRWPEKVVIPIKRIGYIGVEDDRAVAAASPGTNGYVARGSFREVRIYPSVDAKSLVPVFVPMWRNDPPIPKNPILEGSKPIATLRRGQTVEIKSSPGKNTPCGKYRVASTMQKNIQLLPVHLADSKLALRASGFLENGVNISWDTFIKAAGYELPHPASAKPQSAGAAET

SEQ ID NO: 9154 - protein, 1035 aa, synthetic construct
  REGION 1..1035: note = Synthetic
MTAKGNSPDFLNGLVFGFDVGTGSIGYAVRNGAEFKDVGVLICPEDTNDLSGRRSLRRQRRTLRSKKYRRQWFARELEKLGVPKPAQPPHDPISLRLRALNGDLLKPAELHAALAHLFKRRGYTEVPWATREAPAKESDKDKEEGVIKEKIKELREKVGELLPCQFLAKRREEAGRNPVENWARKIYWPRELLEQEFRKIVEAQRGNFPNLAEKADWLLYGDTQPKRRNGKTYHVYFNATGSRNPGVLGLRWPRFDNRGPALDSFQPVDDTGRPVHVVRKNKEAFTKTQWELALMNFRVLDANTRQKLDPRIHFPAFVENLRNEWNKKGKVTVARLAKLAAPYKDKFLLVENQKALTPESAGGRARYSSPTLAVIREEIAAGRRVDPPQPILKRPGESNDAALNRYLADIKHPVVRHRLVLFRRLLNQLVSKHGKPDMIVVEAVRSLALGQKAKNELNKRNEEFRKQRENAREALSSNNESTSRKAIQRYRLWQEAKGRCPFCLEMIERTDLGHGADIEHLVPRSVVDSNEFFNLTVAHNRCNQELKGNRTPFAAFAHTPRWVDIKDNAEKTFGGRKLEIFLSPKAEELIEQKADLQHTAYIARVIRHVTLIQLGWLGSDGRDPTPERMNPALAFQVTNGQLTSRLRKAWGLNQILHPLPPGKRWEDLTENEQQQFTEKNRGDLRHHALDAMVIACTLPWLAHRTHGAQDEFGNHGWWTQDEKQRSKAANPIFPNEGQMHEVVKREIEKVVVRHHVSRSKNQRTYDTTIYGRPKKNGQVIANCYVSREPVTALRPEDLKSSKTGKSKIYPPELGEYLASAWEAYREIEPDWERQLKAAKNCLPQPFQQRLCFSEFQRWRAENAPAFRWPEKVVIPIKRVGYVGVEDDRAVAPASPGTNGYVARGSFREVRIYPAVDGKSLVPVFVPMWRNDPPIPKNPILEDSKPIATLRRGQTVEIKSSPGKNTPCGKYRIASTMQKNIQLLPIHLADSKLTLRASGFLENGVNISWDTFIKAAGYELPHPASVKPESAGAAET

SEQ ID NO: 9155 - protein, 1043 aa, synthetic construct; identical to SEQ ID NO: 8249
  REGION 1..1043: note = Synthetic

SEQ ID NO: 9156 - protein, 1046 aa, synthetic construct
  REGION 1..1046: note = Synthetic
MKDYVLNKKPEPAANDKFLTGLVFGFDVGTGSIGYAVRKGNDFKDVGVLICDSEGSDLSKRRDLRRQRRTLRSKKFRRQWFAKELVKLGLPKSQTALDDPIALRLRALNGEMLKPEELHAALTHLFKRRGYSKVPWANVEKAVKETAKPKKDDDEGIIKEAVKEMKAKLGDKHPCQFLAEEKARVGNSPTTNWARKLYWPREVLRDEFLAIVKAQQKNFPQLTEKAAWLLYGDSQSKEKNGETFHVFFKSTEARNPGVLGLRWPRFDNRGPALDSLQPVDEQGRPLHVVRKNKEAFGNAQWELALMNFRVLDAETRQKRDPRTDFPIFIENVRNEWNKKGKVTEARLKKLAEPFKGKFLLIEDQKPLTPDHGGGRARYSSATLNLIHKEISEGRRVDPPQPILRRKGENAEQALNRYLADVKHPVVQHRLVLFRRLLMQLVSRYGQPDMIVLEAVRSLALGQKAKNELNQRNEKFRKERENAREQLSSNNESFSRKAIQRYRLWQEAKGRCPFCLQTIERTDLGHGADIEHLVPRAIVDCNEFYNLTVAHIKCNRELKGDRTPLTAFGSTSQWEGIKANAENCFSGRKLEIFLSPDAEQLIEQKSDLQHTAYIARVIRHISLIQLGWLNDAGRDPTPEKQNPALSFQVTNGQLTSRLRKAWGLNQILHPLPPGKRWDELTDEEQTQFTEKNRGDLRHHSLDAMVIACTLPWLAHRTHGAKDELGRHGWWTQDEKQRSKAANPLFPNEGQMHEVVKQEIEKVVVRHHVSRSNHKRTYDTTIYGRPKRSGVPIPDCYVSREPITALKPADLKSLKTGKSKIFPPELGDYLASAWEKYCETEPEWEKQIKANNKCLPEAFQKRLCFSDFQRWRQDGAPVFVWPKQIKIPIKRVGYIGVEDDSAVAPASPGTKGFVARGSFREVHLHPSEDGKSLVPVFVPLWRLDKPIPKAPIKPDSEPVAMIRRGQTVEIKNSPGRNTPVGKYRVASTMQQNIKLLPVHLADIKESLKASGFLENGVNISWDTFIKSAGYELPHPPSVKPQSESPHQA

SEQ ID NO: 9157 - protein, 1040 aa, synthetic construct
  REGION 1..1040: note = Synthetic
MKINISSNANPFLTGLVFGFDVGTGSIGHAVRRGSHFMDVGVLICDSEGSDLSKRRDLRRQRRTLRSRKFRRKWFADELAKLGLIKPEIPPHDPISLRLRALNGEALKPEELHAALTHLFKRRGFSKVPWANEEKAAKENAKPKNDDDEGEIKEKVNEIIKELAGKYPCQLLAERRTESGKSPAKEWARKIYWPREILRDEFLAIAEAQKKYFPELAGKTGWLLYGDSQPKKKGEETYHVFFKTTEAQNPGVLGLRWPRFDNRGPALDSLQPVDDQGRPLHVVRKNKEAFAKAQWELALMNFRVLDIETRQKRDPRTDFPIFIENLRNEWNKKGKVTEARLKKLAEPFKDKFLLIEDQKPLAPETGAGRARYSSPTLELIRKEIGEGRRVDPPQPILRRKGESAEQALNRYLADIKHPLVRHRLVLFRRLLSQLVSQYGQPDMIVLEAVRSLALGQKAKNELNKRNEKFRKEREVAREQLSSNNESISRKAIQRYRLWQEAKGRCPFCQQTIERTDLGHGADIEHLVPRSIVDCNEFYNLTVAHIKCNRELKGDRTPFAAFGGTSQWEGLKANAENCFGGRKLEIFLSPNAEELIEQKSDLQHTAYIARVIRHIALIQLGWVNDAGRDPTPDRQNAALSFQVTNGQLTSRLRKAWGLNQILHPLPPGRRWDELTDEEQNQFTEKNRGDLRHHALDAMVIACTLPWLAHRTHGAKDELGRHGWWTQDEKQRSKAANPLFPNEGEMHDAVKKEIERVVVHHHVSRSIHQRTYDTTIYGRPKQNGVPVPDCYVSREPITALKPADLKSPKTGKSKVFPPLLGDYLAMAWESYCETEPDWEKQIKANKNCLPEAFQKRLCFSDFQRWRADDAPSFRWPEKIMIPIKRVGYIGVENDSAVAPASPGTHGYVARGSFREVHLHPSEDGKSIVPVFVPLWRLDKPIPKAPIRPNSKPIATIRRGQTVEIKNSPGHNTPLGKYRVASTMQQNIKLLPVYLADIKESLKASGFLENGVNISWDTFIKSAGYELPHPPPVKPQSESPDQA

SEQ ID NO: 9158 - protein, 1040 aa, synthetic construct
  REGION 1..1040: note = Synthetic
MKFNISTNANPFLTGLVFGFDVGTGSIGYAVRKGSEFKDVGVLICDSEGSDLSKRRDLRRQRRTLRSKKYRRQWFDKELVKLGLPKPENPPNDPISLRIRALNGEELKPEELHAALTHLFKRRGYSKVPWANAEKVAKENAKPKNDDDEGKIKEAVKEIKEKLAGKHPCQFLAERRMEVGKSPTEHWARKIYWPREVLRDEFLAIAQAQKKHFPKLTENADWLLYGDSQPKKKGEETYHVFFKTTEARNPGVLGLRWPRFDNRGPALDSLQPLDENGRQLHVVRKNKEAFTKTQWELALMNFRVLDANTRQKLDPRIQFPVFIENLRNEWNKKGKVTEARLKKLAEPFKNKFLLIEDQKPLAPETRAGRARYSSPTLELIRKEIGNGRRVDPPQPILRRKGENAEQALNRYLADIKHPLVRHRLVLFRRLLTQLISRHGEPEMIVLEAVRSLALGQKAKNELNKRNEKFRKEREIAREQLSSNNESISRKAIQRYRLWLEAKGRCPFCQQTIERTDLGHGADIEHLVPRSIVDCNEFYNLTVAHIKCNRELKGDRTPFAAFGGTSQWEGIKANAENCFSGRKLEIFLSPNAEELIEQKSDLQHTAYIARVIRHIALIQLGWMNDAGRDPTPDRQNAALSFQVTNGQLTSRLRKAWGLNQILHPLPPGKRWDELTDEEQNQFTEKNRGDLRHHALDAMVIACTLPWLAHRTHGAKDELGRHGWWTQDEKQRSKAANPLFPNEGQMHDTVKKEIERVVVRHHVSRSIHQRTYDTTIYGRPKRNGVPVPDCYVSREPITALKPADLKSPKTGKSKVFPPLLGDYLATAWESYCETEPDWEKQIKANKNCLPEAFQKRLCFSDFQRWRADDAPSFRWPEKIIIPIKRVGYIGVEDDSAVAPASPGTHGYVARGSFREVRLHPSEDGKSLVPVFVPLWRLDKPIPKAPIRPNSEPVATIRRGQTVEIKNSPGRNTPLGKYRVASTMQQNIKLLPVHLADIKESLKASGFLENGVNISWDTFIKSAGYELPHPPSVKPQPESPNQA

SEQ ID NO: 9159 - protein, 842 aa, synthetic construct
  REGION 1..842: note = Synthetic
MNRTDSRNDFLTGLVFGFDVGTGSIGYAVRQGSAFKDVGVLICDSEGSDLSGRRTLRRQRRTLRSKKYRRQWFAEELIKLGLPKPEQPPNDPISLRLRALNGDELKPEELHAALTHLFKRRGYSKVPWANVEKEAKASAKPKKDDDDEGVIEKVEEVRKKLGNKHPCQFLAEERARVGDSPTDKWARKIYWPREVLRDEFLAIAAAQKKHFPTLAEKTAWLLYGDSQPKKKGEETYHVFFKTTEARNPGVLGLRWPRFDNRGPALDSFRPVDENGRPLHVVRKNKEAFTNAQWELALMNFRVRDANTRQKIDPRIHLPVFIENLRNEWNKKGKVTEGRLKKLAQPFEAKFLLIEHQKPLTPETGTGRARYSSPTLELIRKEIGEGRRVDPPQPILRRKGETADQALNRYVADIKHPLVRHRLVLFRRLLAQLVSRYGQPDMIVLEAVRSLALGQKAKNELNKRNEDFRKKRENAREQLSSTGESISRKAIQRYRLWEDAKGRCPFCLQTIERTDLGHGADIEHLVPRAVVDCNEFYNLTVAHIKCNRELKGERTPFAAFCATPQWPDIKDNAEKTFSGRKLEIFLSPNAEELIEQKDDLQQTAYIARVIRHISLIQLDWLNDEGRDPTPEKQNSALRFQVTNGQLTSRLRKAWGLNQILHPLPPGKRWDELTEEEQSQFTEKNRGDLRHHALDAMVISCTLPWLAHRTHGATDEFGRHGWWTQDEKQRSKAANPLFPNEGQMHGVVKTEIEKVIVRHHISRSNHQQAYATTLYSKKAKDTYVAREVFTTLTPKNIDNIWPKEFAHYCKAAWGRYADESPDIEAELKKTRGCLPKSFEVDPIL

SEQ ID NO: 9160 - protein, 1030 aa, synthetic construct
  REGION 1..1030: note = Synthetic
MGANSNSSLSQTDFLTGLVFGFDVGTGSIGYAVRKGNEFKDAGVLICESEGSDLSKRRDLRRQRRTLRSKKYRRTWFANELTKLGLVKPENPSNDPIALRVRALNGETLKPEELHAALTNLFRRRGYSKVPWANIEKTVKEPARLKKDENDEGVKEKVEEIRVKLGSKHPCQFLAEEKARVGNSPTDKWARKIYWPREVLQNEFEAIIEAQKKNFPQLADKSDWLLYGDSQSKKKGEETFHVFFKSSEALNPGVMGLRWPRFDNRGPALDSLRPVDEQGRPLHVVRKNKEAFTKAQWELALMNLRVLDIATRQKRDPRTDFPTFVENLRNEWDKKGKVTEARLKKLAEPFKEKFLLIEDQKPLTPETGAGRARYSSPTLDLIRKEIGDGRRIDPPQPILRRKGENADQALNRYLADIKHPLVRHRLVLFRRLLAQLCSLYGQPDLIVLEAVRSLALGQKAKNELNKRNERFRKEREIARGDLAAVGKSISRKAITRYRLWKEAQSTCPFCGNKITQEQIHNGLADIEHLVPRTIVDCNEFYNLTVAHVKCNRELKNERIPFVAFANTPEWPKLKANAERCFTGRKLEIFLSPNAEELIEQKADLQHTAYIARVIRHISLLQLGWLNDEGRDPTPEKQNPALRFQVTNGQLTSRLRKAWGLNQVLHPLVPGKRWDALTDEEQKQFTGKNRGDLRHHALDAMVIACTLPWLAHRTHGAKDAFGRHGWWTQDEKQRSKAANPLFPNEGQMHEVVKQEIERVVVRHHESRSNHQQSYATTVYGKLAPDTYAAREKLADLKQSDFRDVHPRQLGTYLDAAWERFKEETPDLDALLKKTNNRLPSAFIDKLCFSNFQKWRDAEAPTFTWPKPVKIPIRNVKLIAPVNDNSVLRFAPGTSGFVKRTTFKEVHIYPSADKKSFVPVFVPYWKGDKPVGFDQILPGSKPVVILRKRSIIKTIKPLSTGHPPGNYCLYELGQVQPYLLPPHIAKNEEAIESFGIKKSGIKPRWADLIRALGYELPHPPLVKPQPPGAAEA

SEQ ID NO: 9161 - protein, 909 aa, synthetic construct
  REGION 1..909: note = Synthetic
MGANSNSSLSQTDFLTGLVFGFDVGTGSIGYAVRKGNEFKDVGVLICESEGSDLIKRRDLRRQRRTLRSKKYRRTWFANELTKLGLVKPENPSNDPIALRVRALNGETLKPEELHAALTNLFRRRGYSKVPWANIEKTVKEPARLKKDENDEGVKEKVEEIRVKLGSKHPCQFLAEEKARVGNSPTDKWARKIYWPREVLQNEFEAIIEAQKKNFPQLADKSDWLLYGDSQSKKKGEETFHVFFKSSEALNPGVMGLRWPRFDNRGPALDSLRPVDEQGRPLHVVRKNKEAFTKAQWELALMNLRVLDIATRQKRDPRTDFPTFVENLRNEWDKKGKVTEARLKKLAEPFKEKFLLIEDQKPLTPETGAGRARYSSPTLDLIRKEIGDGRRIDPPQPILRRKGENADQALNRYLADIKHPLVRHRLVLFRRLLAQLCSLYGQPDLIVLEAVRSLALGQKAKNELNKRNERFRKEREIARGDLAAVGKSISRKAITRYRLWKEAQSTCPFCGNKITQEQIHNGLADIEHLVPRTIVDCNEFYNLTVAHVKCNRELKNERIPFVAFANTPEWPKLKANAERCFTGRKLEIFLSPNAEELIEQKADLQHTAYIARVIRHISLLQLGWLNDEGRDPTPEKQNPALRFQVTNGQLTSRLRKAWGLNQVLHPLVPGKRWDALTDEEQKQFTGKNRGDLRHHALDAMVIACTLPWLAHRTHGAKDAFGRHGWWTQDEKQRSKAANPLFPNEGQMHEVVKQEIERVVVRHHESRSNHQQSYATTVYGKLAPDTYAAREKLADLKQSDFRDVHPRQLGTYLDAAWERFKEETPDLDALLKKTNNRLPSAFIDKLCFSNFQKWRDAEAPTFTWPKPVKIPIRNVKLIAPVNDNSVLRFAPGTSGFVKRTTFKEVHIYPS

SEQ ID NO: 9162 - protein, 911 aa, synthetic construct
  REGION 1..911: note = Synthetic
MKTCIPKDVAPSRSGNESFLTGLVFGFDVGTGSIGYAVRRGSTFLDVGVLICDSEGSDLSKRRELRRQRRTLRSRKFRRQWFAKELIKLGLPKPEQAPHDPISLRLRALNAETLKPEELHTALTHLFKRRGYSKVPWANVEKVVRENDKLKGDDGEGEIKRSVAETAHKLEGKHPCQFLAAEMEKVGKSPTASWARKVYWPREALRGEFLAIAKAQSRNFPKLLEKSDWLLYGDSQPKEKNGEVFHVFFKSTETRNPGVLGLRWPRFDNRGPALDSLQPVDEQGRPQHVVRKNKEAFTKAQWELALMNFRVLDANTRQKIDPRMRFPIFIDNLRNEWNKKGKVTEARLKKLAKSFEAEFLLIEDQGPLTPEMGGGRSRYSSPTLKIIRQEISEGRRVDPPQPILRRKGETAEEGLNRYLAEIKHPLVRHRLILFRGILSQLIARHGQPGTIVLEAVRSLALGQKAKNELNKRNETFRKERQNARAQLTSNNESISRKAIQRYRLWQEAKGRCPFCLQTIERTDLGHGADIEHLVPRTVLDCNEFYNLTVAHIKCNRELKGERTPFAAFSGTTQWPDIKDHAEKTFSGRKLEIFLSPTAEQLIEQKSDLQHTAYIARVIRHIALIQLDWLNSEGRDPTPEKQNSALGFQVTNGQLTSRLRKAWGLNQILHPLPAGKRWDELTEAEQNQFTEKNRGDLRHHALDAMVIACTLPWLAHRTYGATDEFGRHGWWTQDEKQRSKAANPLFPEEGQMHDVAKQEIEKVIVRHHVSRSNHQQAYATTLYSKKAKDTYVAREVFTTLTPRNLGSIWPKEFAYYCEAAWKRYADESADIEAELKKTKGCLPENFTHKLCFSHFQKWRQDDFPEFYWPREIKIPIRNVRLISVKDDSAVVPFSLGTHAFIKRTGFKEVQIF

SEQ ID NO: 9163 - protein, 1034 aa, synthetic construct
  REGION 1..1034: note = Synthetic
MKDYILKDVKPSSSSKDSFLTGLVFGFDVGTGSIGYAVRKGSEFKDVGVLICDSKGSDLSNRRDLRRQRRTLRSKKYRRQWFANELVKLGLPKPQVPLDDPLSLRLRAFNGEKLKPEELHAALTHLFKRRGYSKVPWANVEKPAKESAKLKKDDDEEGVKEKVEEIRAKLGSKHPCQFLAEEKARVGNSPTDKWARKIYWPREVLRDEFRAIVSAQKKNFPKLVEKTDWLLYGDSQPKKRGEEIYHVFFKTTEARNPGVLGLRWPRFDNRGPALDSLQSVDEQGRPLHVVRKNKEAFSKTQWELALMNFRVLDEKHRQKLDPRINFPVFIENLRNEWNKKGKVTEARLKKLAEPFKEQFLLIKDQKPLTPEGGAGRARYSSPTLELIRREIGEGRRVDPPQPILRRKGENAEQALNRYLADIKHPLVRHRLVLFRRLLMQLVSRYGQPDMIVLEAVRSLSLGQKAKNELNKRNEQFRKERENAREQLSSNNESFSQKAIQRYRLWQEAKGRCPFCLQTIERTDLGHGADIEHLVPRSAVDCNEFYNLTVAHIKCNRELKGDRTPLAAFGGTSLWEGIKANAKNCFTGRKLEIFLSPNAEELIEQKSDLQHTAYIARVIRHISLIQLGWLNDEGRDPTPEKQNPALSFQVTNGQLTSRLRKAWGLNRILHPLPPDKRWDELTEAEQKQFTEKNRGDLRHHALDAVVIACTLPWLAHRTHGATDEFGRHGWWTQDEKQRSKAANPIFPNDGQMHDVVKKEIERVVVRHHVSRSNHQQAYATTLYAKKAKDIYVAREVFMSLTPKNLGSIWPKEFAYYCEAAWKRYTDESPDIAAELKKAKGCVPENFTRKLCFSHFQKWRQDDCPEFYWPKEIIIPIRSVRWIAVKDDSTVVPFSPGTHAYVKRTTYKEVRIYISADGKKFVPALVPYWKHDKPICNEAINAELGLVATIKKGQIVELKKALSAGYKPGRYIVTDFGQVQVIILPDYMADNDDARIGFGLPKTGIKPRWHEFVSCLGYELPHPPPVKPQSENPHQA

SEQ ID NO: 9164 - protein, 999 aa, synthetic construct
  REGION 1..999: note = Synthetic
YAVRKGAEFLDVGVLICDSEGSDLSKRRDLRRQRRTLRSKKYRRQWFARELLKMGLRKPEKPPNNPISLRLRALNGEGLKPEELYAALTHLFKRRGYSKVPWANTEKASKDPTKPKKDDEEGKIKEAVREIRAKLGEKHPCQFLAERCAEVGKSPTEKWARKIYWPRAVLQREFEAIAKAQKKHFPELATKVDWLLYGESQAKERNGETFHVFFKTTEAQNPGVMGLRWPRFDNRGPALDSFQPVDDEGRPLHVVRKNKAAFAKAQWELALMNFRVLDSATRQKVDPRFAFPIFIENLRNEWNKKGKVTETRLKKLAEPFKERFLLVANQKPLTPDGGAGRARYSSPTLELIHKDISSGRRVDPPQPILRRKGENSEEALNRYLAEIKHPLVRHRLVLFRRLLSQLIGRYGKPDLIVLEAVRSLALGQKAKNELNQRNEKFRKEREVAREQLSSNNESFSRKAIQRYRLWQEAKGRCPFCLQMIERTDLGHGADVEHLVPRAIVDCNDFYNLTVAHIKCNRELKGDRTPLTAFGGTSQWEGIKANAENCFTGRKLEIFLSPNAEGLIEQRSDLQHTAYIARVIRHISLIQLGWLNGDGRDPTPEKQNPALSFQVTNGQLTSRLRKSWGLNQILHPLPAGKRWDELTSEEQNQFTEKNRGDHRHHALDAIVIACTLPWLAHRTHGAKDQFGRHGWWTQDEKGRSKAANPLFPNEGQMYEVAKKEIEKAVVKHHVSRSNHQQAYATTLYAKKADNTYVARETFTSLTPKNLGSIWPKEFAYYCEAAWKKYADESADIEAELKRTKTCVPESFTRKLCFSHFQKWRQDDCPEFCWPKKIKIPIRNVRLISVKDDTAVVPFSPGTHAYVKRTTYKEVRIHISSTGTKFVPALVPYWKHDKPVCNEAINADLGIVTTIKKGQIVLLKKALAAGYKPGRYLVTDFGQVQVIILPEYVADNGDARTGFGLPKTGIKPRWHEFVSCLGYELPHPASIKPQAASAAQA

SEQ ID NO: 9165 - protein, 1030 aa, synthetic construct
  REGION 1..1030: note = Synthetic
MNGTTVEAKDSFTEGLVFGFDVGTGSIGYAVRRGSEFLDVGVLICDSEGSDLSKRRELRRQRRTLRSRKARRQWFAGELVKLGLIRPSTPPTDPISLRLRALNGEALKPEELHSALTHLFKRRGYSKVPWANVEKAAKATAKSKPDDEEGLIKKAVGEIHHEMAERACQFPCQLLKVRRDEAGQSPIKEWGRKIYWPRELLEKEFRAIAAAQQERFPEFVQKTDWLLHGDSQAKLKGEETYHVYFKASQAKNPGILGMRWPRFDNRGPALDALQPVDELGRPLHVVRKNKDAFTQAQWELALMNFRVLDANTRQKRDPRIDFPVFIGNLRNEWSKKGKVTEARLKKLAEPFSDKFLLIEDQKPLTPETGAGRARYSSPTLKLIRREIGEGRRVDPPQPILQRKGEDAEQALNRYLADIKHPLVRHRLVLFRRLLVKLVACFGTPDTIVLEAVRTLALGQKAKNELNRRNETFRQERENAREQLASNNESFSRKAIQRYRLWQEAKGRCPFCLQTIARTDLGHGADIEHLVPRSVVDCNELYNLTVAHIKCNRELKGDRTPLAAFGGTSQWEGLKANAELCFRGRKLEIFLSPNAEELIEQKSDLQHTAYIARVIRHISLIQLGWLSSEGRDPTPEKQNAALSFQVTNGQLTSRLRKSWGLNQILHPLPPGKRWDDLTEAEQRQFTEKNRGDLRHHALDAMVIACTLPWLAHRTHGAKDQFGRHGWWTQDEKQRSKASNPLFPKEGQMHEVVKREIEKVTVRHHVSRSNHQKSYANTLYAKKAKDTYVAREVFTSLTPKNLAFIWPKEFAYYCETAWKQYSEESPDIAGELKRSKNCVPESFTRKLCFSHFQRWRQDNFPVFYWPQKIIIPIRNVRLISVKDDTAVVPFSAGTHAYVKRTTYKEVRIHISADGKKFVPALVPYWKHDKPVCNENINTQFGIIATIKKGQIVELKKALSAGYRPGRYIVTDFGQVQVVILPDYIADNEDARTGFGLPKTGIKPRWHEFVDSLGYELPHPPSAKPQPAGAAEA

SEQ ID NO: 9166 - protein, 884 aa, synthetic construct
  REGION 1..884: note = Synthetic
SKVPWANVEKAANESARPKKDDDDEGVKDKVEEIRKKLGGRHPCQFLSEEKVRVGSSPTDHWARKIYWPREVLRDEFLAIVGAQKENFPKLAEKPDWLLYGDSQAKIKGEDTFHVFFKTTEARNPGVLGLRWPRFDNRGPALDSLQPVDEQGRPLHVVRKNKDAFTKAQWELALMNFRVLDFETRQKRDPRADFPVFIENLRNEWNKKGKVTEARLKKLAGPFQDKLLLIEDQKPLTPETGAGRARYSSPTLELIRKEIGEGRKVDPPQPILRRKGETAEQALNRYLADIKHPLVRHRLALFRRLLIQLVSRYGQPDVIVLEAVRSLALGHKAKNELNQRNEKFRQERENAREQLSSNNESISRKAIQRYRLWQEAKGRCPFCLQTIERTDLGHGADIEHLVPRTIVDCNEFYNLTVAHVKCNRELKRDRTPLAAFGGTSQWEGIKANAENCFSGRKLEIFLSPYAEELIEQKSDLQHTAYIARVIRHISLIQLGWLNAEGRDPTPEKQNPALSFQVTNGQLTSRLRKAWGLNQILHSLPPGKKWDDLTDEEKEQFTEKNRGDLRHHALDAMVIACTLPWLAHRTYGATDQFGRHGWWFQDEKQRSKAANPLFPNEGQMYEVAKREIEKVVVRHHVSRSNHQQAYATTLYAKKAENTYVAREVFTSLTPKNLSHIWPREFSYYCEAAWKRYAEESPDIDSELKKTKNCVPESFTYRLCFTHFQKWRADDCPEFYWPKEIKIPIRSVRLISVKDNSAVVPFSPGTHAYVKRTSFKEVHIFLAADGKSYVPVFIPYWKADKPVVTQPIKEGGKPIAIIQRGQTVELKKALGAGSPPGKYRVVTTMQAQVKLIPVHLQNKPETLVAFGMKSFGANPYWPDFIRALGY

SEQ ID NO: 9167 - protein, 1027 aa, synthetic construct
  REGION 1..1027: note = Synthetic
MNGLEVSSKSSFTEGLVFGFDVGTGSIGYAVRKGAKFLDVGVLICDSEGADLSKRRELRRQRRTLRSRKARRKWFAGELVKLGLPKPENPPNDPITLRLRALNGEALKPEELHAALTHLFKRRGYSKVPWANVEKAANESARPKKDDDDEGVKDKVEEIRKKLGGRHPCQFLSEEKVRVGSSPTDHWARKIYWPREVLRDEFLAIVGAQKENFPKLAEKPDWLLYGDSQAKIKGEDTFHVFFKTTEARNPGVLGLRWPRFDNRGPALDSLQPVDEQGRPLHVVRKNKDAFTKAQWELALMNFRVLDFETRQKRDPRADFPVFIENLRNEWNKKGKVTEARLKKLAGPFQDKLLLIEDQKPLTPETGAGRARYSSPTLELIRKEIGEGRKVDPPQPILRRKGETAEQALNRYLADIKHPLVRHRLALFRRLLIQLVSRYGQPDVIVLEAVRSLALGHKAKNELNQRNEKFRQERENAREQLSSNNESISRKAIQRYRLWQEAKGRCPFCLQTIERTDLGHGADIEHLVPRTIVDCNEFYNLTVAHVKCNRELKRDRTPLAAFGGTSQWEGIKANAENCFSGRKLEIFLSPNAEELIEQKSDLQHTAYIARVIRHISLIQLGWLNAEGRDPTPEKQNPALSFQVTNGQLTSRLRKAWGLNQILHSLPPGKKWDDLTDEEKEQFTEKNRGDLRHHALDAMVIACTLPWLAHRTYGATDQFGRHGWWFQDEKQRSKAANPLFPNEGQMYEVAKREIEKVVVRHHVSRSNHQQAYATTLYAKKAENTYVAREVFTSLTPKNLSHIWPREFSYYCEAAWKRYAEESPDIDSELKKTKNCVPESFTYRLCFTHFQKWRADDCPEFYWPKEIKIPIRSVRLISVKDNSAVVPFSPGTHAYVKRTSFKEVHIFLAADGKSYVPVFIPYWKADKPVVTQPIKEGGKPIAIIQRGQTVELKKALGAGSPPGKYRVVTTMQAQVKLIPVHLQNKPETLVAFGMKSFGANPYWPDFIRALGYELPHPPSVKPQSESPHQA

SEQ ID NO: 9168 - protein, 1033 aa, synthetic construct
  REGION 1..1033: note = Synthetic
MKDYVLDKKTEPASNDKFLSGLVFGFDVGTGSIGYAVRRGSEFKDVGVLICDSEGSDLSKRRDLRRQRRTLRSKKFRRQWFAKELAKLGLPKSESALDDPITLRLRALNGEKVKPEELHAALTHLFKRRGYSKVPWANVEKAARETAKPKNDDDERKIKEAVKEMKVKLGDKHPCQFLAEEKARVGKSPTTNWARKIYWPREVLRDEFLAIVAAQNKNFPQLAEKADWLLYGDSRSKEKNGETFHVFFKATEARNPGVLGLRWPRFDNRGPALDSLQPVDEQGRPLHVVRKNKEAFTKAQWELALMNFRVLDAATRQKRDPRVDFPIFIENVRNEWNKKGKVTEARLKKLAEPFKDKFLLIEDQKPLTPETGSGRARYSSPTLNLIRNEINEGRRVDPPQPILRRNGENAQQALNRYLADIKHPAVRHRLALFLGILKQLIKAHGQPDIIVLEAVRSLALGQKAKNELNKRNELFRKERENAREQLLSNHESISRKAIQRYRLWQEAKGRCPFCLQTIERTDLGRGADIEHLVPRAIVDCNEFYNLTVAHIKCNRELKGDRTPLTAFGGTAQWEGIKANAENCFTGRKLEIFLSPDAEQLIEQKSDLQHTAYIARVIRHISLIQLGWLNDAGRDPTPEKQNPALSFQVTNGQLTSRLRKAWGLNQILHPLPPGKRWDELTDEEHIQFIEKNRGDLRHHALDAMVIATTLPWLAHRTYGATDEFGRHGWWTQDEKQRSKAVNPLFPNEGQMHDVVKKEIERVVVRHHVSRSNHQQAYATTLYAKKAKDTYVAREVFTSLTPKNLGSIWPETFALYCEAAWRRYADESPNIEGELKRTKNCVPENFTRKLCFSHFQKWRQDDCPEFYWPKEIKIPIRNVRLISVKDDTAVIPFSPGTHAFVKRTGFKEVQIFLAEDERSFVPVFVPYWKNDKLICDKPIKQNTKPVAIIRRGQTIEIKKALAAGSPPGKYRVVTTMQAQVKLVPAHLQNKPETLVAFGMKSFGANPPWPDFIRALGYELPHPPSVKPQSESPHQA

SEQ ID NO: 9169 - protein, 1025 aa, synthetic construct
  REGION 1..1025: note = Synthetic
MKDYILKDKPEPAANDKFLTALVFGFDVGTGSIGYAVRKGNEFKDVGVLICDSEGSDLSKRRDLRRQRRTLRSKKFRRQWFAKELVKLGLPKSETPLDDPISLRLRALKGATLKPEELHAALTHLFKRRGYSKVPWANVEKSVKETTKPKKNDDEGIIKEAVKEMKAKLGDKHPCQFLSEEKARIGNSPTTHWARKIYWPREVLRDEFLAIVKAQQKSFPLLAEKADWLLYGDSQLKEKNGETFHVFFKSTEARNPGVLGLRWPRFDNRGPALDSLQPVDEQGRPLHVVRKNKEAFGNAQWELALMNFRVLDFKTRQKRDPRTDFPIFIENVRNEWNKKGKVTEARLKKLAEPFKAKFLLIEDQKPLTPDHGGGRARYSSPTLDLIHKEISEGRRVDPPQPILRRKGENAEQALNRYLADVKHPVVQHRLVLFRRLLMQLVSRYGQPDMIVLEAVRSLALGQKAKNELNQRNEKFRKERENAREQLSSNNESFSRKAIQRYRLWQEAKGRCPFCLQTIERTDLGHGADIEHLVPRAIVDCNEFYNLTVAHIKCNRELKGDRTPLTAFGGTSQWEGIKANAENCFTGRKLEIFLSPDAEQLIEQKSDLQHTAYIARVIRHISLIQLGWLNDAGRDPTPEKQNPALSFQVTNGQLTSRLRKAWGLNQILHPLPPGKRWDELTDEEQNQFTEKNRGDLRHHSLDAMVIACTLPWLAHRTHGATDEFGRHGWWTQDEKQRSKAVNPLFPNEGQMHEVVKREIEKVVVKHHVSRSNHQQAYATTLYAKKAKDTYVAREVFTSLTPKNLGSIWPETFASYCEAAWRRYSDESSDIAGELKRTKNCVPESFTRKLCFSHFQKWRQDDCPDFYWPKEIKIPIRNVRLISVKDDTAVVPFSPGTHAFVKRTGFKEVQVFLAEDEKSFVPVFVPYWKNDKLICDKPIKQNTKPVAVIRRGQTIETKKELAAGSPPGKYRVVTTMQAQVKLVPAHLQNKPETLVAFGMKSFGANPPWPDFIRALGYELPHPPSAKP

SEQ ID NO: 9170 - protein, 1025 aa, synthetic construct
  REGION 1..1025: note = Synthetic
MILKPSSPDFFNGLVFGFDVGTGSIGYAVRKGADFKDVGVLICDSEGSDLSKRRDLRRQRRTLRSKKFRRQWFAKELVKLGLLKPENSPDDPISLRLRALNGEALKPEELHVALTHLFKRRGYSKVPWANVEKAATETAKPKKDDDEGIIKEAVKEMKVKLGDKHPCQFLAEEKARVGDSPTSHWARKIYWPREVLRDEFLAIVEAQKKSFRQLAEKADWLLYGESQSKEKNGETFHVFFKTTEARNPGVMGLRWPRFDNRGPALDSLQPVDEQGRPLHVVRKNKKAFTVAQWELALMNFRVLDAATRQKRDPRIDFPIFIENLRNEWNKKGKVTETRLKKLAEPFNEKFLLIEDQKPLTPETGTGRARYSSPTLELIRKEIGEGRRVDPPQPILRRKGENAEQALNRYLADIKHPLVRHRLVLFRRLLMQLASCYGQPDMIVLEAVRSLALGQKAKNELNKRNEQFRKERENARAQLSSNNESFSRKSIQRYRLWQEAKGRCPFCLQTIERTDLGYGADIEHLVPRSIVDCNEFYNLTVAHLKCNRELKGDRTPLTAFGGTPQWEGIKANAETCFNGRKLEIFLSPNAEELIEQKSDLQHTAYIARVIRHISLVQLGWLNNEGRDPTPEKQNPALNFQVTNGQLTSRLRKAWGLNQILHPLPPGKRWDELTDEEQNQFTEKNRGDLRHHSLDAMVICCTLPWLAHRTHGAKDLFGRHGWWTQDEKQRSKAANPLFPNDGEMHEVVKKEIEKVVVRHHVSRSNHQQAYATTLYAKKAKNTYVAREVFTSLTPKNLGSIWPETFALYCEAAWRRYSEEAADLAGELKRTKNCVPESFTRKLCFSHFQKWRQDDCPDFYWPKEIKTPIRNVRLISVKDDTAVVPFSPGTHAYVKRTGFKEVQVFLAADGKSFVPVFVPYWKNDKPLCGQPIMQASKPIAVIQRGQTVEIKKALAAGSPPGKYRVITTMQAQVKLVPAHLQNKPETLVAFGMKSFGANPPWPDFIRALGYELPHPPSVKSQSESPHQA

SEQ ID NO: 9171 - protein, 1017 aa, synthetic construct
  REGION 1..1017: note = Synthetic
MTLKTGSPDFFNGLVFGFDVGTGSIGYAVRKGSEFKDVGVLICDSEGSDLSKRRDLRRQRRTLRSKKYRRQWFAKELLKLGLPKPQTALDDPISLRLRALNGDTLKPEELHAALTHLFKRRGYSKVPWANVDKTVKETAKPKKDDDEGIIKEAVKEMLAKLGGKHPCQFLSERRVEVGKSPTENWARKIYWPREVLQKEFEAIAAAQKKNFPKLAEKSDWLLYGDSQSKEKNGEKFHVFFKTTEARNPGVMGLRWPRFDNRGPALDSLQPVDEQGRPLHVVRKNKEAFGLTQWELALMNFRVVDFKTRQKRDPRADFPIFIENIRNEWNKKGKVTEARLKKLAEPFKDKFLLIEDQKPLAPETGAGRARYSSPTLELIRKEIGEGRRVDPPQPILRRNGENAEQALNRYLADIKHPVVRHRLTLFRRILAQLISRHGLPDMIVLEAVRSLALGQKAKNELNQRNEKFRKERENAREQLSSNNESISRKGIQRYRLWQEAKGRCPFCLQTIERTDLGHGADIEHLVPRSIVDCNEFYNLTVAHLKCNRELKGDRTPLAAFGGTSQWEGIKANAETCFTGRKLEIFLSPNAEELIEQKSDLQHTAYIARVIRHISLIQLGWLNKEGRDPTPEKQNPALNFQVTNGQLTSRLRKAWGLNQILHPLPPGKRWDELTDEEQNQFAEKNRGDLRHHSLDAMVIACTLPWLAHRTHGAKDSLGRHGWWTQDEKQRSKAANPLFPNEGQMHDVVKNQIDKVVVKHHVSKSNHQQAYATTLYAKKAKNTYVAREVFTSLTPRNLGSIWPDIFASYCEAAWRRYADESTDLEGELKRTKGNVPEGYTKKLCFAHFQKWRADDCPDFYWPKEIKIPIRNVRLISVKDDTAVVPFSLGTHAFVKRTGFKEVQVFLAQDGKSFVPVFVPYWKNDKPLCGQPIMPGSKPVAVIQRGQTVELKRALISGTPPGKYRVVTTMQAQVKLVPAHLQNKPDTLVAFGMKSFGANPYWPDFIRALGYELPHPPPVKS

SEQ ID NO: 9172 - protein, 966 aa, synthetic construct
  REGION 1..966: note = Synthetic
LVKLCLPKPETALDDPIALRLRALKGEVLKPEELHAALAHLFKRRGYSEVPWKKTKAKTKKDDNPKKKEDDDEGEVLKAVEGIRKEMVEKDCKHAADLLATRIKEQNLWREHINCGKPLAELWAAAKMKGDLPKAESLQRKIYWPREVLQKEFEAIAAAQKKNFPQLAKKTDWLLYGDTKEVKGHHVFFKTTEARNPGVMGLRWPRFDNRGPALDSFQPVDEQGRPMHVVRKNKEAFGLAQWELALMNFRVLDFKTRQKRDPRTDFPIFIENVRNEWNKKGKVTEARLKKLAEPFKDKFLLIEDQMPLTPETGAGRARYSSPTLELIRKEIGEGRRVDPPQPILRRNGENAEQALNRYLADVKHPLVRHRLILFRGILARLVKEHGQPDTIVLEAVRSLALGQKAKNELNQRNEKFRKEREVAREQLSSNNESISRKGIQRYRLWQEAKGRCPFCLQTIERTDLGHGADIEHLVPRSIVDCNEFYNLTVAHIKCNRELKGDRTPLTAFGGTSQWEGIKSNAETCFTGRKLEIFLSPNAEELIEQKSDLQHTAYIARVIRHISLMQLGWLNNEGRDPTPEKQNPALRFQVTNGQLTGRLRKAWGLNQILHPLPPGKRWDELTDEEQKQFTEKNRGDLRHHSLDAMVIVCTLPWLAHRTHGAKDSLGRHGWWTQDEKQRSKAANPLFPNEGQMHEVVKQEIEKVVVKHHVSRSNHQQAYATTLYAKKAKDTYVAREVFTSLTPKNLGSIWPETFASYCESAWRRYSDESADLAGELKRTKNCVPESFTRKLCFSHFQKWRQDDCPEFYWPKEVKIPIRSVRLISLKDDTAVVPFSPGTHAYVKRTGFKEVQIFLAEDEKSFVPVFIPYWKNDKPLCVKPIKKNIKPVATIRRGGIVTLKKLSGPKNPLGNYRVVSTMQAKINLVPTHIQDKPEALLASGFLANGVNISWQTFFNAAGYELPHPPPVKS

SEQ ID NO: 9173 - protein, 1029 aa, synthetic construct
  REGION 1..1029: note = Synthetic
MKAPHTYPQSSPDFFNGLVFGFDVGTGSIGYAVRRGKEFLDVGVLICDSEGGDLSKRRDLRRQRRTLRSKKYRREWFAKELVKIGLPKPEQSLHDPISLRLRALNGEGLKPEELHAALTHLFKRRGYNRVPWANAETAASEPAKSKKDDDEGVIKEKVKEIKVKLGGKHPSQFLAEEKTRVGNSPTANWARKIYWPREALQSEFEAIVAAQKKQFPQLAEKANWLLYGDSQPKIRAGETYHVFFKTTEAQNPGVLGLRWPRFDNRGPALDSLQPVDGQGRPLHVVRKNKEAFTKAQWELALMNFRVLDVKTRQKRDPRIDFPVFIENVRNEWKKKGKVTEARLKKLAAPFREVFLLVEEQKPLTPEMGTGRARYCSPTLELIRKEIGEGRRVDPPQPILRRKGENAEQALNRYLADIKHPLVRHRLVLFRRLLVQLTSRYGQPNLIVLEAVRSLALGQKAKNELNKRNETFRKERELARENLASNNESFSRKAIQRYRLWQEARGRCPFCLQTIERTDLGHGADIEHLVPRSIVDCNEVYNLTVAHIKCNRELKGDRTPLAAFGGASQWEGIKANAENCFRGRKLEIFLSPEAEQLIEQRSDLQHTAYIARVIRHISLVQLGWLDEAGRDPTPEKQNPALSFQVTNGQLTSRLRKAWGLNQILHPIPPGKRWDELTDEEQKQFTEKNRGDLRHHALDAMVIACTLPWLAHRTHGATDQLGRHGWWTQDDKQRSKAANPLFPDEGQMHEAVRKEIEKVVVRHHVSRSNHQQSYATTLYAKKAKDTYVAREVFTSLTPKNLGSIWPETFASYCESAWRRYSDESADLPGELKKTKGNVPEGFTKKLCFAHFQKWRVDGCPDFHWPKEIKIPVRNVRLISVKDDTAVVPFSPGTHAYVKRTGFKEVQVFLAEDGKSFVPVFVPYWKNDKRLWEGTIKVDSKPISTIRRGSIVMLRKPTGPKNPPGTYRVSTTMQDNIQLIPAHIAKDKEALLSSGFLANGVTISWKTFFNAVGYELPHPPPLKSQSESPRQA

SEQ ID NO: 9174 - protein, 1120 aa, synthetic construct
  REGION 1..1120: note = Synthetic
LASHLKCHLPANKYWERPDQYSKTPPDEMFFRHPLFGFLTPVWRFLLYPPAVRRSLGGHLHFGNTGHRILDMTDYVLKNANPSPVGNDSFLTGLVFGFDVGTGSIGYAVRRSSTFLDVGVLICDSEGSDLSKRRDLRRQRRTLRSKKFRRQWFAKELVKLGLPKSETALDDPISLRLRALNGDALKPEELHAALTHLFKRRGYSKVPWANVEKTVKETAKPKKDDDEGIIKEAVKEMKAKLGGKHPCQFLAEEKNRVGKSPTTNWARKIYWPREVLRDEFLAIVAAQKKKFPQLAEKSDWLLYGDSQSKEKNGETFHVFFKSTEARNPGVLGLRWPRFDNRGPALDSLQPVDEQGRPLHVVRKNKEAFGLAQWELALMNFRVLDFKTRQKRDPRTDFPVFIENIRNEWNKKGKVTEARLKKLAEPFKDKFLLIEDQKPLTPETGAGRARYSSPTLELIRKEIGEGRRVDPPQPILRRKGENAEQALNRYLADVKHPLVRHRLVLFRGILARLVKDYGQPDMIVLEAVRSLALSPKAKNELNKRNEQFRKERENARENLSSNNESFSRKAIQRYRLWQEAKGRCPFCLQTIERTDLGHGADIEHLVPRSIVDCNEFYNLTVAHIKCNRELKGDRTPLTAFGGTSQWEGIKANAETCFTGRKLEIFLSPNAEELIEQKSDLQHTAYIARVIRHISLVQLGWLNDEGRDPTPEKQNPALKFQVTNGQLTSRLRKAWGLNQILHPLPPGKRWDELTDEEQKQFTEKNRGDLRHHSLDAMVIACTLPWLAHRTHGAKDSLGRHGWWTQDDKQRSKAANPLFPNEGQMHEVVKKEIEKVVVRHHVSRSNHQQSYATTLYAKKAKDTYVAREVFTSLTPKNLGSIWPETFASYCEAAWQRYSDEAADLEGELKKTKGNVPTSFTTKLCFAHFQKWRADDCPEFYWPKEIKIPIRNVRLISVKDDTAVVPFSPGTHAYVKRTGFKEVHIYPTADKKGFVRVFIPYWKNDKPISDKPIPEGVKPIAIIRRGMIVELQKKEGGKHPSGKYRVVTTMQGQIQLIPAHIKKDKAALLASGFLENGVNFSWDTFINALGKESPAAMEAIQKAKEGKGKYYPLSSLDEKQRPTS

SEQ ID NO: 9175 - protein, 920 aa, synthetic construct
  REGION 1..920: note = Synthetic
SKKYRRQWFAKELAKLGLPKPENPPNDPISLRLRALNGETLKPEELHAALTHLFKRRGYSKVPWANVEKAAKESAKQKKDDSDEGVKEKAEEIRAKLGSKHPCQFLAEEKARVGNSPTDKWARKIYWPREVLRDEFLAIAKAQKKNFPKLAEKTDWLLYGDSQPKTKAGETYHVFFKTTEARNPGVLGLRWPRFDNRGPALDSLQPVDEKGRALHVVRKNKEAFGMAQWELALMNFRVLDFKTRQKLDPRIDFPIFIENLRNEWNKKGKVTEARLKKLSEPFKEKFLLIEDQKPLTPETGAGRARYSSPTLELIRKEIGEGRRVDTPQPILRRTGENAEQALNRYLADIKHPLVRHRLVLFRRLLIQLVSRYGQPDMIVLEAVRSLALGQKAKNELNKRNEQFRKERENAREQLSSNNESFSRKAIQRYRLWQEAKGRCPFCLQTIERTDLGHGADIEHLVPRSVVDCNEFYNLTVAHIKCNRELKGDRTPLAAFGGTSQWEGIKANAENCFIGRKLEIFLSPNAEELIEQKSDLQHTAYIARVIRHISLIQLGWLNDEGRDPTPEKQNPALNFQVTNGQLTSRLRKAWGLNQILHPLPPDKRWDELTEAEQNQFTEKNRGDLRHHALDAVVIACTLPWLAHRTHGATDKFGRHGWWTQDEKQRSKAANPIFPNDGQMHDVVKKEIEKVVVRHHVSRSNHQQAYATTLYAKKAKDTYVAREVFTSLTPKNLGSIWPETFASYCEAAWRRYSDESADLAAELKKTKGCVPENFTKKLCFSHFQKWRQDDCPEFYWPKEIKIPIRNVRLISVKDDTAVVPFSPGTHAYVKRTGFKEVHIYPTADKKGFVRVFIPFWKNDKPISDKPIPENVKPIAIIRRGMIIELQKKPGGKHPSGKYRVVTTMQGQIQLIPAHIKKDKQAL

SEQ ID NO: 9176 - protein, 1048 aa, synthetic construct
  REGION 1..1048: note = Synthetic
MKTYVLKDANPSSPNKDSFLNGLVFGFDVGTGSIGYAVRKGSEFKDVGVLICDSEGSDLSKRRDLRRQRRTLRSKKYRRQWFAKELAKLGLPKPENPPNDPISLRLRALNGETLKPEELHAALTHLFKRRGYSKVPWANVEKAAKESAKQKKDDSDEGVKEKAEEIRAKLGSKHPCQFLAEEKARVGNSPTDKWARKIYWPREVLRDEFLAIAKAQKKNFPKLAEKTDWLLYGDSQPKTKAGETYHVFFKTTEARNPGVLGLRWPRFDNRGPALDSLQPVDEKGRALHVVRKNKEAFGMAQWELALMNFRVLDFKTRQKLDPRIDFPIFIENLRNEWNKKGKVTEARLKKLSEPFKEKFLLIEDQKPLTPETGAGRARYSSPTLELIRKEIGEGRRVDTPQPILRRTGENAEQALNRYLADIKHPLVRHRLVLFRRLLIQLVSRYGQPDMIVLEAVRSLALGQKAKNELNKRNEQFRKERENAREQLSSNNESFSRKAIQRYRLWQEAKGRCPFCLQTIERTDLGHGADIEHLVPRSVVDCNEFYNLTVAHIKCNRELKGDRTPLAAFGGTSQWEGIKANAENCFIGRKLEIFLSPNAEELIEQKSDLQHTAYIARVIRHISLIQLGWLNDEGRDPTPEKQNPALNFQVTNGQLTSRLRKAWGLNQILHPLPPDKRWDELTEAEQNQFTEKNRGDLRHHALDAVVIACTLPWLAHRTHGATDKFGRHGWWTQDEKQRSKAANPIFPNDGQMHDVVKKEIEKVVVRHHVSRSNHQQAYATTLYAKKAKDTYVAREVFTSLTPKNLGSIWPETFASYCEAAWRRYSDESADLAAELKKTKGCVPENFTKKLCFSHFQKWRQDDCPEFYWPKEIKIPIRNVRLISVKDDTAVVPFSPGTHAYVKRTGFKEVHIYPTADKKGFVRVFIPFWKNDKPISDKPIPENVKPIAIIRRGMIIELQKKPGGKHPSGKYRVVTTMQGQIQLIPAHIKKDKQALLAAGFLENGVNFSWDTFINALNRESPAAIEAIRKAKSGQGQYYPLSSLDEKERPN

SEQ ID NO: 9177 - protein, 1048 aa, synthetic construct
  REGION 1..1048: note = Synthetic
MKTYVLKDANPSSPNKDSFLNGLVFGFDVGTGSIGYAVRKGSEFKDVGVLICDSEGSDLSKRRDLRRQRRTLRSKKYRRQWFAKELAKFGLPKPENPPNDPISLRLRALNGETLKPEELHAALTHLFKRRGYSKVPWANVEKAAKESAKQKKDDSDEGVKEKAEEIRAKLGSKHPCQFLAEEKARVGNSPTDKWARKIYWPREVLRDEFLAIAKAQKKNFPKLAEKTDWLLYGDSQPKTKAGETYHVFFKTTEARNPGVLGLRWPRFDNRGPALDSLQPVDEKGRALHVVRKNKEAFGMAQWELALMNFRVLDFKTRQKLDPRIDFPIFIENLRNEWNKKGKVTEARLKKLSEPFKEKFLLIEDQKPLTPETGAGRARYSSPTLELIRKEIGEGRRVDTPQPILRRTGENAEQALNRYLADIKHPLVRHRLVLFRRLLIQLVSRYGQPDMIVLEAVRSLALGQKAKNELNKRNEQFRKERENAREQLSSNNESFSRKAIQRYRLWQEAKGRCPFCLQTIERTDLGHGADIEHLVPRSVVDCNEFYNLTVAHIKCNRELKGDRTPLAAFGGTSQWEGIKANAENCFIGRKLEIFLSPNAEELIEQKSDLQHTAYIARVIRHISLIQLGWLNDEGRDPTPEKQNPALNFQVTNGQLTSRLRKAWGLNQILHPLPPDKRWDELTEAEQNQFTEKNRGDLRHHALDAVVIACTLPWLAHRTHGATDKFGRHGWWTQDEKQRSKAANPIFPNDGQMHDVVKKEIEKVVVRHHVSRSNHQQAYATTLYAKKAKDTYVAREVFTSLTPKNLGSIWPETFASYCEAAWRRYSDESADLAAELKKTKGCVPENFTKKLCFSHFQKWRQDDCPEFYWPKEIKIPIRNVRLISVKDDTAVVPFSPGTHAYVKRTGFKEVHIYPTADKKGFVRVFIPFWKNDKPISDKPIPENVKPIAIIRRGMIIELQKKPGGKHPSGKYRVVTTMQGQIQLIPAHIKKDKQALLAAGFLENGVNFSWDTFINALNRESPAAIEAIRKAKSGQGQYYPLSSLDEKERPN

SEQ ID NO: 9178 - protein, 1023 aa, synthetic construct
  REGION 1..1023: note = Synthetic
MKEYVLKTASGDSFLSGLVFGFDVGTGSIGYAVRRGSNFLDVGVLICDSEGSDLSGRRSLRRQRRTLRSKKARRNWFASELAKLGVFKPQAIVDDPISLRLRALNGDKLKPEELHAALTHLFKRRGYSKVPWANAEKAVKENAKAKKDDEEGIIKEAVKEITVKLAGKHPCQFLAEEKIRVGKSPTANWARKIYWPRELLQKEFEAIIAAQAKNFPQLVEKKDWLLYGDTKEIKGHHVYFKTTEARNPGVLGLRWPRFDNRGPALDSLQPVDEQGRPLHVVRKNKEAFTKAQWELALMNFRVLDAKTRQKIDPRIQFPIFIENLRNEWNKKGKVTEARLKKLAEPFAEKFLLIEDQKPLTPETGTGRARYSSPTLALIQKEISEGRRIDPPQPILKRKGENAEDALNRYLADIKHPLVRHRLVLFRGILRQLVKDYGQPDVIVLEAIRSLALGQKAKNELNKRNEIFRKERENAREQLASNNESFSRKAIQRYRLWQEAKGRCPFCLQTIERTDLGHGADIEHLVPRSIVDCNEFYNLTVAHLKCNRELKGDRTPFAAFSGTSLWPDIKDHAEKTFSGRKLEIFLNPNAEELIEQKSDLQHTAYIARVIRHISLIQLGWLNDRGRDPTPDKQNPALRFQVTNGQLTSRLRKAWGLNQILHPLPPGKRWDELTDEEQKQFTEKNRGDLRHHAMDAMVIVSTLPWLAHRTYGATDELGRHGWWTQDEKQRSKAANPIFGEQMHDVVKEQIEKVVVRHHISGSNHQQAYATTLYAKKAKDTYVAREVFTTLTPKNLGSIWPETFASYCEAAWQRYSDEATDVDAELKKTKGCVPESFTKKLCFAHFQKWRADDCPEFCWPKEIKIPIRNVRLISVKDDTAVVPFSPGTHAYVKRTGFKEVQVFIAEDGRSFVPVFVPYWKNDKISPEKPIKQNSKPITVIRRGMVIETKKPFSAGQPVGKYRVLATSQNQLRLLPHHVANKEEAIISFGLGKKGLQPYWPDFIRALGYELPHPPSVKPQPESPHQA

SEQ ID NO: 9179 - protein, 1027 aa, synthetic construct
  REGION 1..1027: note = Synthetic
MKDYILHGENTFFTGLVFGFDVGTGSIGYAVRKGAEFKDVGVLICDGEGSDLSKRRDLRRQRRTLRSKKYRRQWFANELVKLGLSKPQKALDDPITLRLRALNGEILKPQELYAALTHLFKRRGYSKVPWANIEKAAKETTKPNKDDDEGEIKEAVKEIKAKLGDKHPCQFLAGEKTRVGNSPTDKWARKIYWPREVLQKEFEAIIEAQKKNFPQLVKKTDWLLYGDSQPKKKNGETFHVFFKTTEARNPGVMGLRWPRFDNRGPALDSLQPVDEQGRPLHVVRKGKNAFIKTQWELALMNFRVLDIETRQKRDPRIDFPIFIENLRNEWNKKGKVTEARLKKLAEPFNEKFLLIENQKPLTPETGAGRARYSSPTLELIRKKIGEGRRVDPPQPILRRKGENAEQALNRYLADIKHPLVRHRLVLFRRLLAQLTSQYGQPNMIVLEAVRSLALGQKAKNELNKRNEQFRKERENAREQLSSNNESFSRKAIQRYRLWQEAKGRCPFCTQTIERTDLGHGADIEHLVPRSIVDCNEFYNLTVAHIKCNRELKGDRTPLTAFGETSQWEGIRANAENCFSGRKLEIFLSPTAEELIEQKSDLQHTAYIARVIRHISLIQLAWLNDEGRDPTPEKQNSALSFQVTNGQLTSRLRKAWGLNRILHPLPPGKRWDELTDEEQKQFTEKNRGDLRHHALDAMVITCTLPWLAHRTYGAKDKFGHHGWWTQDEKQRSKAANPIFPNEGQMHEVVKKEIEKVVVRHHVSRSNHQQAYATTLYAKKAENTYVAREVFTSLTPRNLGNIWPKEFAAYCEAAWMRYTEESADINAELKKTKGCVPENFTCKLCFSHFQQWREDVAPAFYWPEKIKIPIRNVRLISVKDDGAVVPFSPGTHAYVKRTAFKEVQIFLAEDGKSFVPVFVPQWKRDKLVCEIPIMPNAKPVAIIRRGMVVETKKPFSTGQPAGKYRVLVTSQNQLRLLPHHVANKEEAILSFGLGKKGLQPYWPDFVRALGYELPHSPSVKPQPSGAAEA

SEQ ID NO: 9180 - protein, 1034 aa, synthetic construct
  REGION 1..1034: note = Synthetic
MKTYVLKPANQSPSGKDSFLTGLVFGFDVGTGSIGYAVRKGSEFKDVGVLICDSEGSDLSKRRDLRRQRRTLRSKKFRRQWFDKELVKLGLPKPENPPNDPILLRLRALNGEELKPEELHAALTHLFKRRGYSKVPWANVEKAAKESAKPKKDDDDEGVIEKVEEIRAKLGGKHPCQFLAEEKARVGNSPTDKWARKIYWPREVLRDEFLAIVAAQKKNFPKVAEKTDWLLYGDSQSKKKGEETFHVFFKTTEARNPGVMGLRWPRFDNRGPALDSMRPVDDQGRPLHVVRKNKEAFGKAQWELALMNFRVLDFKTRQKRDPRTDFPIFIDNLRNEWNKKGKVTEARLKKLSEPFKEKFLLIEDQKPLTPETGVGRARYSSPTLELIRKEIGEGRRVDPPQPILRRKGENAEQALNRYLADIKHPLVRHRLVLFRRLLMQLASRYGQPDMIILEAVRSLALGQKKKNELNQRNEKFRKERESAREQLSSNNESFSRKAIQRYRLWQEAKAHCPFCLQTIERTDLGHGADIEHLVPRSVVDCNEFYNLTVAHIKCNRELKGDRTPLAAFGGKAQWEGIKSNAENCFSGRKLEIFLSPDAEELIEQKSDLQHTAYIARVIRHISLIQLGWLNDEGRDPTPEKQNPALSFQVTNGQLTSRLRKSWGLNQILHPLPPGKRWDELTEEEQKQFTEKNRGDLRHHSLDAMVIACTLPWLAHRTHGATDELGRHGWWTQDEKQRSKAANPLFPNEGQMHEVVKKEIEKVVVRHHVSQSNHQQAYATTLYAKKAKDTYVAREVFTSLTPKNLGNIWPETFASYCEAAWRRYSDESADIEGELKKTKGNVPEGYTKKLCFAHFQKWRADDCPEFYWPKEIKIPIRNVRLISVKDDTAVVPFSPGTHAFVKRTGFKEVQVFLAEDEKSFVPVFIPHWKGDKLVSEKPIKQNTKPVAVIRRGMVVETKKAFSAGQPPGKYRVLVTGQMQLKLLPHHVANKEEAIVSFGLGKKGIQPMWADFIRVLGHELPHPPSVKPQPPGAAEA

SEQ ID NO: 9181 - protein, 867 aa, synthetic construct
  REGION 1..867: note = Synthetic
VANIRASSCQFLAEEKARVGNSPTDKWARKIYWPREVLRDEFLAIVAAQKKNFPKVAEKTDWLLYGDSQSKKKGEETFHVFFKTTEARNPGVMGLRWPRFDNRGPALDSMRPVDDQGRPLHVVRKNKEAFGKAQWELALMNFRVLDFKTRQKRDPRTDFPIFIDNLRNEWNKKGKVTEARLKKLSEPFKEKFLLIEDQKPLTPETGVGRARYSSPTLELIRKEIGEGRRVDPPQPILRRKGENAEQALNRYLADIKHPLVRHRLVLFRRLLMQLASRYGQPDMIILEAVRSLALGQKKKNELNQRNEKFRKERESAREQLSSNNESFSRKAIQRYRLWQEAKAHCPFCLQTIERTDLGHGADIEHLVPRSVVDCNEFYNLTVAHIKCNRELKGDRTPLAAFGGKAQWEGIKSNAENCFSGRKLEIFLSPDAEELIEQKSDLQHTAYIARVIRHISLIQLGWLNDEGRDPTPEKQNPALSFQVTNGQLTSRLRKSWGLNQILHPLPPGKRWDELTEEEQKQFTEKNRGDLRHHSLDAMVIACTLPWLAHRTHGATDELGRHGWWTQDEKQRSKAANPLFPNEGQMHEVVKKEIEKVVVRHHVSQSNHQQAYATTLYAKKAKDTYVAREVFTSLTPKNLGNIWPETFASYCEAAWRRYSDESADIEGELKKTKGNVPEGYTKKLCFAHFQKWRADDCPEFYWPKEIKIPIRNVRLISVKDDTAVVPFSPGTHAFVKRTGFKEVQVFLAEDEKSFVPVFIPHWKGDKLVSEKPIKQNTKPVAVIRRGMVVETKKAFSAGQPPGKYRVLVTGQMQLKLLPHHVANKEEAIVSFGLGKKGIQPMWADFIRVLGHELPHPPSVKPQPPGAAEA

SEQ ID NO: 9182 - protein, 1026 aa, synthetic construct
  REGION 1..1026: note = Synthetic
MKDYVLKDANQAPSGKDSFLNGLVFGFDVGTGSIGYAVRKGSEFKDVGVLICDSEGSDLSKRRDLRRQRRTLRSKKYRRQWFAKELIKLGLSKPQTALDDPIALRLRALNGEVLKPEELYTALTHLFKRRGYSKVPWANVEKTAKETGKPKKADEEGVIKEKVKEIKAELGDKHPCQLLAERRVEVGKSPTENWARKIYWPREALRDEFLAIVAAQKKYFPKLAEKTDWLLYGDSQPKEKNGETFHVFFKTTEARNPGVLGLRWPRFDNRGPALDSLQPVDEQGRPLHVVRKNKEAFTKAQWELALMNFRVLDFETRQKRDPRTDFPIFIENIRNEWNKKGKVTEARLKKLAEPFKEKFLLIEDQKPLTPETGAGRARYSSPTLELIRKEIGEGRRVDPPQPILRRKGENAEQALNRYLADIKHPLVRHRLVLFRRLLMQLASRYGQPDMIVLEAVRSLALGQKAKNELNKRNEQFRKERENAREQLSSNNESFSRKAIQRYRLWQEAKGRCPFCLQTIERTDLGHGADIEHLVPRSVVDCNEFYNLTVAHIKCNRELKGDRTPLAAFGGTSQWEGIKVNAENCFIGRKLEIFLSPNAEQLIEQKSDLQHTAYIARVIRHISLIQLGWLDDQGRDPTPEKQNPALSFQVTNGQLTSRLRKAWGLNQILHPLPPDKRWDELTETEQNQFTEKNRGDLRHHALDAIVIACTLPWLAHRTHGATDKFGRHGWWTQDEKQRSKAANPIFPNDGQMHDVVKTEIEKVVVRHHVSRSNHQQAYATTLYAKKAKDTYVAREIFTSLTPKNLGSIWPEAFASYCESAWRRYSDESADLAGELKKTKGNVPENFTKKLCFAHFQKWRADDCPEFSWPKEIKIPIRNVRLISVKDDTAVVPFSPGTHAFVKRTGFKEVQVYLAEDKKSFVPVFIPYWKGDKLVCEKPIKKDAKPVVVIRRGMVVETKKAFSAGQPPGKYRVLVTSQLQLKLLPHHIANKEDAIVSFGLGKKGIQPMWADFIRVLGHELPHPPSVKP

SEQ ID NO: 9183 - protein, 1026 aa, synthetic construct
  REGION 1..1026: note = Synthetic
MKDYVLKDANQAPSGKDSFLNGLVFGFDVGTGSIGYAVRKGSEFKDVGVLICDSEGSDLSKRRDLRRQRRTLRSKKYRRQWFAKELIKLGLSKPKTALDDPIALRLRALNGEVLKPEELYTALTHLFKRRGYSKVPWANVEKTAKETGKPKKADEEGVIKEKVKEIKAELGDKHPCQLLAERRVEVGKSPTENWARKIYWPREALRDEFLAIVAAQKKYFPKLAEKTDWLLYGDSQPKEKNGETFHVFFKTTEARNPGVLGLRWPRFDNRGPALDSLQPVDEQGRPLHVVRKNKEAFTKAQWELALMNFRVLDFETRQKRDPRTDFPIFIENIRNEWNKKGKVTEARLKKLAEPFKEKFLLIEDQKPLTPETGAGRARYSSPTLELIRKEIGEGRRVDPPQPILRRKGENAEQALNRYLADIKHPLVRHRLVLFRRLLMQLASRYGQPDMIVLEAVRSLALGQKAKNELNKRNEQFRKERENAREQLSSNNESFSRKAIQRYRLWQEAKGRCPFCLQTIERTDLGHGADIEHLVPRSVVDCNEFYNLTVAHIKCNRELKGDRTPLAAFGGTSQWEGIKVNAENCFIGRKLEIFLSPNAEQLIEQKSDLQHTAYIARVIRHISLIQLGWLDDQGRDPTPEKQNPALSFQVTNGQLTSRLRKAWGLNQILHPLPPDKRWDELTETEQNQFTEKNRGDLRHHALDAIVIACTLPWLAHRTHGATDKFGRHGWWTQDEKQRSKAANPIFPNDGQMHDVVKTEIEKVVVRHHVSRSNHQQAYATTLYAKKAKDTYVAREIFTSLTPKNLGSIWPEAFASYCESAWRRYSDESADLAGELKKTKGNVPENFTKKLCFAHFQKWRADDCPEFSWPKEIKIPIRNVRLISVKDDTAVVPFSPGTHAFVKRTGFKEVQVYLAEDKKSFVPVFIPYWKGDKLVCEKPIKKDAKPVVVIRRGMVVETKKAFSAGQPPGKYRVLVTSQLQLKLLPHHIANKEDAIVSFGLGKKGIQPMWADFIRVLGHELPHPPSVKP

SEQ ID NO: 9184 - protein, 1030 aa, synthetic construct; identical to SEQ ID NO: 8252
  REGION 1..1030: note = Synthetic

SEQ ID NO: 9185 - protein, 1045 aa, synthetic construct
  REGION 1..1045: note = Synthetic
MKDYYLKDANQSPVGKDSFLNGLVFGFDVGTGSIGYAVRQGSEFKDVGVLICDSEGSDLSKRRDLRRQRRTLRSKKFRRQWFDKELVKLGLPKSETVLDDPISLRLRALNGDALKPEELHAALTHLFKRRGYSKVPWANVEKATKETAKPKKDDDEGIIKEAVKEMKVKLGDKHPCQFLAEEKVRVGNSPTTNWARKIYWPREVLRDEFLSIVAAQKKKFPKLAEKTDWLLYGDSQSKEKNGETFHVFFKTTEARNPGVLGLRWPRFDNRGPALDSLQPVDEQGRPLHVVRKNKEAFTKAQWELALINFRVIDRATGKLTSPDNKSLIRLREIWESGKRKKKKTPMDSDESESIKISEKVLQRWEKDFSQKYKLVEGQQALTPQTGAGRARYSSLTLERIVAGEHFNPPQPILRRKGENAEQALNRYLADIKHPLVRHRLVLFRRLMMQLVSRYGQPDMIVLEAVRSLALGQKAKNELNKRNERFRKERENAREQLSSNHESFSRKAIQRFRLWQEAKGRCPFCLQPIERTDLGHGADIEHLVPRAIVDCNEFYNLTVAHIKCNRELKGDRTPLTAFGGTSQWEGIKANAENCFSGRKLEIFLSPNAEELIEQKSDLQHTAYIARVIRHISLIQLGWLNDEGRDPTPEKQNPALSFQVTNGQITHRLRKAWGLNQILHPLPPGKRWDELTDAEQNQFTEKNRGDLRHHALDAMVICCTLPWLAHRTVRVKYPATGEDGWWDLDEKTQRSVARNPLFPNEGQMHEVVKQEIEKVVVRHHVSRSNHQQAYATTLYAKKAKDTYVAREVFTSLTPKNLGSIWPETFASYCEAAWRRYADEAANLEGELKRTKNCVPENFTRKLCFSHFQKWRQDDCPEFYWPKEIIIPIRSVRLISLKDDTAVVPFSPGTHAYVKRTGFKEVQIFLAEDEKSFVPVFIPYWKKDKPLCVKPIKENTKPVATIRRGGIVTLKKLSGPKNPLGNYRVVSTMQAKINLVPTHIQDKPEALLASGFLANGVNISWQTFFNAAGYELPHPPPVKPQPSGAAEA

SEQ ID NO: 9186 - protein, 1020 aa, synthetic construct
  REGION 1..1020: note = Synthetic
ANPFLTGLVFGFDVGTGSIGYAVRQGSDFKDVGVLICDSEGGDLSKRRDLRRQRRTLRSKKYRRQWFDKELVKLGLPNPQIALDDPISLRIRALKGDALKPEELHAALTHLFKRRGYSKVPWANVEKAAKETTKPKKDDDEGIIKEAVKEMKLKLGDKHPCQFLAEEKIRVGNSPTTNWARKIYWPREVLRDEFLAIIEAQKKNFPNLAEKSDWLLYGNSQPKEKNGEIFHVFFKTTDARNPGVLGLRWPRFDNRGPALDSLQPVDEEGRPLHVVRKNKNVFTKAQWELAVMNFRVIDRTTGKLTVPDNKSLLRLREIWESSKRKKKKEQPEANESETVKISEKVLQRWEKDFSIQYKLVEGQQPLTPQTGAGRARYSSLTLEKIITGKRFDPPQPILLRKGENTEQALNRYLADIKHPLVRHRLILFRQLLMQLTSRYGQPDMIVLEAVRSLALGQKKKNELNQRNEKFRKERENAREQLSSNNESISRKGIQRYRLWQEAKGRCPFCLQTIERTDLGHGADIEHLVPRSIVDCNEFYNLTVAHIKCNRELKGDRTPLTAFGVTPQWEGIKANAETCFSGRKLEIFLSPNAEQLIEQKSDLQHTAYIARVIRHISLVQLGWLNNEGRDPTPEKQNPALRFQVTNGQLTSRLRKAWGLNQILHPLPPGKRWDELTDEEQKQFTEKNRGDLRHHSLDAMVICCTLPWLAHRTHGATDQFGHHGWWTQDEKQRSKAANPLFPNEGQMHEVVKKEIEKVVVRHHVSRSNHQQAYATTLYAKKDKDTYVAREVFTSLTPKNLGSIWPKEFAYYCEAAWKRYADESADIEGELKRTKNCVPENFTRKLCFSHFQKWRQDDCPEFYWPKEIKIPIRNVRLISVKDDTAVVPFSSGTHAFVKRTGFKEVQVFLAEDEKSFVPVFIPYWKGDKLVCEKPIKQNAKPVVVIRRGMVVEAKKAFSAGQPPGKYRVLVTSQMQLKLLPHHVANKEEAIVSFGLGKKGLQPMWADFIRVLGHELPHPPSVKP

SEQ ID NO: 9187 - protein, 1025 aa, synthetic construct
  REGION 1..1025: note = Synthetic
MKDYVLNKKPEPAANDKFLTGLVFGFDVGTGSIGYAVRKGNDFKDVGVLICDSEGSDLSKRRDLRRQRRTLRSKKFRRQWFAKELVKLGLPKSQTALDDPIALRLRALNGEMLKPEELHAALTHLFKRRGYSKVPWANVEKAVKETAKPKKDDDEGIIKEAVKEMKAKLGDKHPCQFLAEEKARVGNSPTTNWARKIYWPREVLRDEFLAIVKAQQKNFPQLAEKADWLLYGDSQLKEKNGETFHVFFKSTEARNPGVLGLRWPRFDNRGPALDSLQPVDEQGRPLHVVRKNKEAFANAQWELALMNFRVLDVETRQKRDPRTYFPIFIENVRNEWNKKGKVTEARLKKLAEPFKEKFLLIEDQKPLSPDTGAGRARYSSPTLNLIHKEISEGRRVDPPQPILRRKGENAEQALNRYLADIKHPLVRHRLVLFRRLLMQLVSRYGQPDMIVLEAVRSLALGQKAKNELNQRNEKFRKERENAREQLSSNNESISRKGIQRFRLWQEAKGRCPFCLQTIERTDLGHGADIEHLVPRSIVDCNEFYNLTVAHIKCNRELKGDRSPLTAFGGTSQWEGIKANAETCFTGRKLEIFLSPNAEELIEQKSDLQHTAYIARVIRHIALVQLGWLNEEGRDPTPEKQNPALKFQVTNGQLTSRLRKAWGLNQILHPLPPGKRWDELTDEEQKQFTEKNRGDLRHHSLDAMVICCTLPWLAHRTHGATDQFGHHGWWTQDEKQRSKAVNPLFPNEGQMHEVVKKEIEKVVVRHHVSRSNHQQAYATTLYAKKAKDTYVAREVFTSLTPKNLGSIWPETFASYCEAAWRRYSDESPDLEGELRRTKNCVPETFTRKLCFSHFQKWRQDDCPDFYWPNEIKIPIRSVRLISVKDDSAVVPFSPGTHAFVKRTGFKEVQVFLAEDEKSFVPVFIPYWKNDKLVSVKPIKQGTKPVAIIRRGMVVETKKAFSTGQPAGKYRVLVTSQLQLKLLPHHVANKEEAIVSFGLGKKGLQPMWADFIRVLGHELPHPPSVKP

SEQ ID NO: 9188 - protein, 1018 aa, synthetic construct
  REGION 1..1018: note = Synthetic
MNDYVLKNKPEPGSNDKFLTGLVFGFDVGTGSIGYAVRKGSDFKDVGVLICDSEGSDLSKRRDLRRQRRTLRSKKFRRQWFAKELAKLGLPKSETALDDPISLRLRALNGEMLKPEELHAALTHLFKRRGYSKVPWANAEKAAKETAKPKKDDDEGIIKEAVKEMKAKLGDNHPCQFLAEEKARVGNSPTTNWARKLYWPREVLRDEFLAIVKAQQENFPQLAEKADWLLYGDSQAKERNGETFHVFFKSTEARNPGVLGLRWPRFDNRGPALDSLQPVDEQGRPLHVVRKNKEAFGNTQWELALMNFRVLNFDTRQKRDPRTDFPIFIENVRNEWNKKGKVTEARLKKLAEPFKEKFLLIEDQKPLTPDNGAGRARYSSPTLNLIHREISEGRRVDPPQPILRCKGENAEQALNRYLADVKHPVVQHRLVLFRRLLMQLVSRYGQPDMIVLEAVRSLALGQKAKNELNQRNEKFRKERENAREQLSSNNESFSRKAIQRYRLWQEAKGRCPFCLQTIERTDLGHGADIEHLVPRAIVDCNEFYNITIAHIKCNRELKGDRTPLTAFGGTSQWQGIKANAENCFTGRKLEIFLSPDAEQLIEQKSDLQHTAYIARVIRHISLIQLGWLNDAGRDPTPEKQNPALSFQVTNGQLTSRLRKAWGLNQILHPLPPGKRWDELTDEEQNQFTEKNRGDLRHHSLDAMVIACTLPWLAHRTHGATDEFGRHGWWTQDEKQRSKAANPLFPNEGQMHDVVKQEIENVIVRHHVSRSNHQQAYATTLYAKKAKDTYVARDKVNELKEKDFTDIYPKELGYYFQAAWSRYVEEEADSEAQLKRTKDKLPETFTKKLCFSHFQQWRAGGAPTFHWPKEVKIPIRNVRIIAVKDDMAVVPFSPGTHAFVKRKGFKEVQIFLAEDEKSFVPVFIPYWKGDKLISEKPIKPNTKPIAIIRRGMVVETKKAFSTGQPAGKYRVLVTGQNQLRLLPPHVANKEEAILSFGLGKKGLQPYWPDFVRALGYELP

SEQ ID NO: 9189 - protein, 1019 aa, synthetic construct
  REGION 1..1019: note = Synthetic
MNRSILPKENLFKDGLVFGFDVGTGSIGYAVRKGSEFKDVGVLICDSEGSDLSKRRDLRRQRRTLRSKKFRRQWFAKELVKLGLPKSQTSLDDPIALRLRALNGEKLKPEEIHAALTHLFKRRGYSKVPWANAEKTAKETTKQKKDDDEGIIKEAVKEMKAKLGDKHPCQFLAEEKVRVGNSPTINWARKIYWPREVLRDEFIAIAEAQKKNFQKLAEKADWLLYGDSQSKEKNGETFHVFFKSTEARNPGVLGLRWPRFDNRGPALDSLQPVDEQGRPLHVVRKNKEAFGNAQWELALMNFRVLDVETRQKRDPRNDFPIFIENVRNEWNKKGKVTEARLKKLAEPFKEKFLLIEDQKPLTPDHGGGRARYSSTTLNLIHKEISEGRRVDPPQPILRRKGENAEQALNRYLADVKHPVVQHRLVLFRRLLMQLVSRYGQPDMIVLEAVRSLALGQKAKNELNQRNEKFRKERENAREQLLSNNESFSRKAIQRYRLWQEAKGRCPFCLQTIERTDLGHGADIEHLVPRAIVDCNEFYNLTVAHIKCNRELKGDRTPLTAFGGTSQWEGIKANAEFCFTGRKLEIFLSPDAEQLIEQKSDLQHTAYIARVIRHISLIQLGWLNDAGRDPTPEKQNPALSFQVTNGQLTSRLRKAWGLNQILHPLPPGKRWDELTDEEQNQFTEKNRGDLRHHSLDAMVIACTLPWLAHRTHGATDEFGRHGWWTQDEKQRSKAVNPLFPNEGQMHEVVKKEIEQVVVRHHVSRSNHQQAYATTLYAKKAKDTYVAREVFTSLTPKNLGSIWPETFASYCEAAWRRYSDESADLAGELKRTKNCVPESFTRKLCFSHFQKWRQDDCPEFYWPKEIKIPIRNVRLISVKDDIAVAPFSPGTHAYVKRTGYKEVQIFLAEDEKSFVPVFIPYWKNDKIVSEKSIKQNTKPIAIIRRGMVVETKKAFSAGQPAGKYRVLVTGQLQVKLLPHHVANKEEAIISFGLGKKGIQPMWADFIRVLGHELPHPPSVKP

SEQ ID NO: 9190 - protein, 970 aa, synthetic construct
  REGION 1..970: note = Synthetic
MAKEHVPADDGVHRREWILGLDIGSRSIGWAALAAGEDLKPTGELLDAGVYIHDGGILDDSKGITRHQKRGEVVRSRRRLRRRRSRRRSLAEVLRSNGIVRQSGWRERNPWWSRSLLAVEPVADPARVRHLAAIAIEHIARHRGWRNPWLPAPEPVAEPVPEDLRKAFDEMSEWAGEQGLDAPPAPVLGVMSWTVLGWGGSVRHSSKEKDRDDNRPGIEKWLPKVLQEHIAAEIATIWKVQSRAHPDLFTDELLKDLTGVVLHQEKPGVPLENVGPCELQPHLYRAPKASPLFQRYRLLSTIANLRIRTPDGELTLDDSQRETVFDLLDGPERLDWAVVADAIDVDPADLRTADAKGTAGKAPNNQIVEKLEGLEAKGPDWRRFREWWKEASDDKRELVVGMAIGDRVIEDEHPEELKELADEIDELGWFELVEKFGRALPPGRARFSRLVLSDLNRQMDAGADLHLATEETYGSGAVGAHVTWETEVPNAGVELSMKRVRQIVDELAGRYGDPSAIGVEIVRDAAMSHQERQDRQNRIKREREARDKVREILKADYGMESPSDADIAKREHLTAQQGICLYCGKVLARLPDVELDHIVPRSTGGSTIWTNLAAVCRPCNERKGNRPFGAWASDGGAPRSLEDVLADVDKMRSDRWREVPKKPYINPDNGRWVISDGEKARREIKSRLRKTEREREFDGADLQHTAFIARAVRERLESRFGGDVKVRVHRGATTAALRRETGLSKILGGGTVKDRGDRRHHAVDAIAMALLVDDKWAWRVRVRDEAYSNHRYELIPWSWVESTRERADISELQVEVDRLVDEGAAVMDQVIPVIQRRLVASGRVHEDTISEWGRRRVGDAWGRNEIVQVRDDAIRTALWQATGRGGKLPADPDRVLVVEGATGISELGPNDEIEVAGERVWIPVRNGWAKSAGLHHARIVKVDYARNGRRESAIELVSVPVVDVYRRENA

SEQ ID NO: 9191 - protein, 809 aa, synthetic construct
  REGION 1..809: note = Synthetic
LVQSEGPVKVRQSSKGGGESQRNLNQWVPKVLQDHIAAELAEIWKVQSQAHPILFTDDSLDDLCATILHQLKPGVPLDRIGRCDLDDRFYRAPKASPSFQRYRLLNVATNLRIKSRSGEKDPLTQEQRDLVLDLLRRGERIEWPEIEEALGLGDSKLVPAEKEGTAGRPPVDMIAERLRSVKGIAKLRKWWDKADPVEREALIAMAISDLAFDEENPQALQAVAQSIEEQGLLDLVEKLGRSLPPGRASYSRQVLNDLSDQMADGADLHQAIERTYGQGAVGHHVKWDDPMPNNGVELSMREVRRLVERLESKHGVPAVIGVEIVRDATRSHADRLEHSRRIQRQRGSRDEARNILISDLAMDKPSPGVIAKQEHITAQAGLCLYCGTKLLLPSTELDHIVPRRTGGATIFNNLAATCRSCNQTKGNRPFGRWCQDDGEAGAKRMEETIARLENLTGPRWKATPAKPFINPETGKWVYSELDLARRDYRRRLKKTDWDREFDDAEIHSTAFVSREVTGRLKRRYPQTRVDVFRGGFTAALRNETKLPRRLGLGEKKDRSDRRHHAMDAIAVALLTNATWAARVRRRNEAFQNNRLGMLSDESLSEIRQKAPVDDLLAVIDKVDESGGPIIEAMVPVLPRRLSTTGRIHEDTVRPWSSKRIGDAWKATEISSVRDQDVARALWRLSSSGGSLKVDEDRVLELADGRKIHADDSVACAIKRNEEKGTSSPVATWMTVRHGWAKTDEIHHARLISARWTENGKEKNAALLVPLSVADVYGSKDPYNLPLSRDMVGVRAHPQLARLLAVDVDP

SEQ ID NO: 9192 - protein, 977 aa, synthetic construct
  REGION 1..977: note = Synthetic
VEYVIGIDAGIRSLGFSAVQYADGKPVNILEAYTQLHDGGVSPRDEKTKVSRRHNNGLARRARNAKKTRKQRLKALDNLLDRLGLPETDIPGDQFWSVRAQLMERYIDNDTERLGKIRAVVRHMARHRGWRNSYQNVQSIDPLAQTPVSTALADTIYRSISQYAAQNGGIRGSRNCQNVPFNSMRQSDNLAELNTIFATQHFDQDSAREIVQAVFFQKSPRGSHVENVGYDQLPGMTDKPRASKASLAFQEFRILHTLSNLKVKDAHDERSLTLDEIENVSDFLFYEADENVSWSDVEAVIGLGENESLTGYSFKRGFSRPPFNTTFKELRRNDSIFAGQDEDVLEAVVDLLIDQRSSDLAEDFLSRLDDSELSSLDSLRFEIGRSPYSADSLNLINEGLMSGYTLPYTLYRFFGVDPTWKPRPSRLDEKTGNLAVDRVLSYVQSFVDHCTDTYGQPSKVVIESVKDSFTSVAKAQEKASKANRRFQIRQNNHERFTAETGQQPSVRAMKRWEAVKRQKNECVYCGAFIDFHSCQRDHIIPQASDASNSVEENLVAVCAPCNQEKSNTPFAVWAKTTDRKGVSVKAAIKRAKKWKYDKSVETFDSFIAVRSGVIRRLSLTSYAEVDSRQMAPVARMAVEMKTRLMDYLPDTEVVAYSGALTHAAWIEGGFSEKNWLHGGPGKQRGDNRHHALDAIIFTLMNDDIARVFSTQLKWYINSRNTDIGQMKLSKKQLQAIESFKERSAHMITLIDENIGSIDVRTPVRKKLYSGSVHEDTIKPFDRSLKLTDKLSASDIKRAATPQLYDFLTSFASYSPTRGLPADANRRAKKPVAGLHSDGTLDLFGSSSACVAVRGGWALIGAGVHHVRIFKHKDRYIFQRVFTSDLAGKKGSLFYAKLPKSSMTMRQLSTKDALAIHSGDAKRIGALQLGSKAQVNGRTWIVRACNSGKLVLENPYDKSETTIVRCPSVTDLALAVGF

SEQ ID NO: 9193 - protein, 1108 aa, synthetic construct; identical to SEQ ID NO: 7722
  REGION 1..1108: note = Synthetic

SEQ ID NO: 9194 - protein, 1141 aa, synthetic construct
  REGION 1..1141: note = Synthetic
VRTTLDPIPTLPVGGSYVVGIDAGQNSVGLFALALTAEGIPHEILAMQSVIHDGGLDPDKAKSNQTRKASAGFARRARRRLRVEKKRLNKLDKLLDAQGWHGRQEAEFPTQIWEDRYRATSSYIEDDEERAQILGEVFRHIARHRGWRNPYQPLADLFDDESQSDAFTRLVSNAQRVGACVDDSDTVGAIVWSALQCPHPVGLDPEDEARWANSNQLRIRTLGTESKKRPGLIDGRLFQVDNVHEIQRICATQNIPAELEEQLLETIFYQKKASAGVMQTVGRCGLQPQLLRCSKAHPEFQRYRIAATLATLKIKEGHSARFLTAEERQKVAAELHNPHTTIATWGDVADLLGIEAPQLTGIASTTPDAELIVAARPPVDTTAIKMATKAKPFLKKWWNDAAPEQQQDFIELQVNYDTDSPDVNNYLLTLTPTELAEIETFSTKELPKGRASFAAETCRILADHLLNSDDSLADAIEKNFHRKPTVAQLTESTGIASVDRSLKIVSRFLQMARNYWGEPQAITVELAREGLMSAKAKADMEFQQRRARKARQTLQEKRGIREDNRRDTLRAEALHRQNNRCLYCGAPIDMHSVEMDHIVPRSGPGATNRVTNLAGSCHRCNQAKGGRTYAEWVKQDHPTYTNRKMVDDFVNHSMNLENQAFSEKSMQKEYLRALHTVGKEDALDSRSLAPTAAMGTILRGRLEAEFPETKVNVLAGFITAEARHAAGYWGLPTLHIEGDPHDNNKRIDRRHHAIDAAIMSITRPYAAQVLAQRKALRDQEKTLGSSYRSATVSNFYGSWKDFQGTDIAHKTAYQRWLSNSQVLIGLVAEKLLNDDIPVWTPLRLSRTSGRAHEDEIRPLAHRPVKAALTAKEIDASATEAQWCALTRCEDYDEKTGLPENFERRIVINGTHLGPNDDLEFFTPKDNKKPNAICDQAALKVRDGWAAAGDFHHLRLYRIPQKKGFAYYFMRVLPFDLPTEGDLFSYELPPQSISIRQAHPKLKAALKKGEAVYLTWLVKNDVLEVDDKALGGIGKTLEEVIPNSTRRWRVIGFDNSTTTIKLAPVLTSPEGVMSKQGGSSVDSRFDEATSRKLKQTVLAPNGWRPSAQVLMRGPLRVIRYDALGRERLSARSPLPYTLIIEP

SEQ ID NO: 9195 - protein, 1141 aa, synthetic construct; identical to SEQ ID NO: 7302
  REGION 1..1141: note = Synthetic

SEQ ID NO: 9196 - protein, 1141 aa, synthetic construct
  REGION 1..1141: note = Synthetic
VRTTLDPIPTLPVEGSYVVGIDAGQNSVGLFALALTAEGVPHEILAMQSVIHDGGLDPDKAKSNQTRKASAGFARRARRRLRVEKKRLNKLEKLLDAQGWHGRQEAEFPTQIWEDRYRAASSYIEDDEERAQVLGEVFRHIARHRGWRNPYQPLADLFDDESQSDAFTRLVSNAQRVGARVDDSDTVGAIVWSALQCPHPVGLDPEDEARWANSNQLRIRTLGTESKKRPGLIDGRLFQVDNVHEIQRICATQNISAELEEQLLGTIFYQKKASAGVMQTVGRCGLQPQLLRCSKAHPEFQRYRIAATLATLKIKEGHSARFLTAEERQKVAAELHNPHTTIATWGDVADLLGIEAPQLTGIASTTPDAELIVAARPPVDTTAIKMATKAKPFLKKWWNDATPEQQQDFIELQVNYDTDNPDVNNYLLTLTPTELAEIETFSTKELPKGRASFAAETCRILADHLLNSDDSLADAIEKNFHRKPTVAQLTESTGIASVDRSLKIVSRFLQMARNYWGEPQAITVELAREGLMSAKAKAEMEFQQRRARKARQTLQEKRGIREDNRRDTLRAEALHRQNNRCLYCGAPIDMHSVEMDHIVPRSGPGATNRVTNLAGSCHRCNQAKGGRTYAEWVKQDHPTYTNRKMVDDFVNHSMNLENQALPKKSMQKEYLRALHTVGKEDALDSRSLAPTATMGTILRGRLEAEFPETKVNVLAGFITAEARHAAGYWGLPTLHIEGDPHDNNKRIDRRHHAIDAAIMSITRPYAAQVLAQRKALRDQEKTLGSSYRSATVSNFYGSWKDFQGTDIAHKTAYQRWLSNSQVLIGLVAEKLLNDDIPVWTPLRLSRTSGRAHEDEIRPLAHRPVKAALTAKEVDASATEAQWCALTRCEDYDEKTGLPENPERRIVINGTHLGPNDDLEFFTPKDNKKPDAICDQAALKVRDGWAAAGDFHHLRLYRIPQKKGFAYYFMRVLPFDLPTEGDLFSYELPPQSISIRQAHPKLKVALKKGEAVYLTWLVKNDVLEVDDKALSGVGKTLEEVIPNATRRWRVIGFDNMSAKIKLAPVLTSPEGVLGKQGGSSVDSRFDEATSGKLKQTVLAPNGWRPSAQVLMRGPLRVIRYDALGRERLSARSPLPFTLIIEP

SEQ ID NO: 9197 - protein, 1141 aa, synthetic construct
  REGION 1..1141: note = Synthetic
VRTTLDPIPTLPVGGSYVVGIDAGQNSVGLFALALTAEGVPHEILAMQSVIHDGGLDPDKAKSNQTRKASAGFARRARRRLRVEKKRLNKLDKLLDAQGWHGRQEAEFPTQIWEDRYRATSSYIEDDEERAQVLGEVFRHIARHRGWRNPYQPLADLFDDESHSDAFTRLVSNAQRVGARVDDSDTVGAIVWSALQCPHPVGLDPEDEARWANSNQLRIRTLGTESKKRPGLIDGRLFQVDNVHEIQRICATQNIPAELEEQLLGTIFYQKKASAGVMQTVGRCGLQPQLLRCSKAHPEFQRYRIAATLATLKIKEGHSARFLTAEERQKVAAELHNPHTTISTWGDVADLLGIEAPQLTGIASTTPDAELIVAARPPVDTTAIKMATKAKPFLKKWWNDAAPEQQQDFIELQVNYDTDNPDVNNYLLTLTPTELAEIETFSTKELPKGRASFAAETCRILADHLLNSDDSLADAIEKNFHRKPTVAQLTESTGIASVDRSLKIVSRFLQMARNYWGEPQAITVELAREGLMSAKAKAEMEFQQRRARKARQTLQEKRGIREDNRRDTLRAEALHRQNNRCLYCGAPIDMHSVEMDHIVPRSGPGATNRVTNLAGSCHRCNQAKGGRTYAEWVKQDHPTYTNRKMVDDFVNHSMNLENQALPKKSMQKEYLRALHTVGKEDALDSRSLAPTATMGTILRGRLEAEFPETKVNVLAGFITAEARHAAGYWGLPTLHIEGDPHDNNKRIDRRHHAIDAAIMSITRPYAAQVLAQRKALRDQEKTLGSSYRSATVSNFYGSWKDFQGTDIAHKTAYQRWLSNSQVLIGLVAEKLLNDDIPVWTPLRLSRTSGRAHEDEIRPLAHRPVKAALTAKEVDASATEAQWCALTRCEDYDEKTGLPENPERRIVINGTHLGPNDDLEFFTPKDNKKPDAICDQAALKVRDGWAAAGDFHHLRLYRIPQKKGFAYYFMRVLPFDLPTEGDLFSYELPPQSISIRQAHPKLKVALKKGEAVYLTWLVKNDVLEVDDKALSGVGKTLEEVIPNATRRWRVIGFDNMSAKIKLAPVLTSPEGVLGKQGGSSVDSRFDEATSGKLKQTVLAPNGWRPSAQVLMRGPLRVIRYDALGRERLSARSPLPFTLIIEP

SEQ ID NO: 9198 - protein, 1141 aa, synthetic construct
  REGION 1..1141: note = Synthetic
VRTTLDPIPTLPVGGSYVVGIDAGQNSVGLFALALTAEGVPHEILAMQSVIHDGGLDPDKAKSNQTRKASAGFARRARRRLRVEKKRLNKLDKLLDAQGWHGRQEAEFPTQIWEDRYRATSSYIEDDEERAQVLGEVFRHIARHRGWRNPYQPLADLFDDESHSDAFTRLVSNAQRVGARVDDSDTVGAIVWSALQCPHPVGLDPEDEARWANSNQLRIRTLGTESKKRPGLIDGRLFQVDNVHEIQRICATQNIPAELEEQLLGTIFYQKKASAGVMQTVGRCGLQPQLLRCSKAHPEFQRYRIAATLATLKIKEGHSARFLTAEERQKVAAELHNPHTTIATWGDVADLLGIEAPQLTGIASTTPDAELIVAARPPVDTTAIKMATKAKPFLKKWWNDATPEQQQDFIELQVNYDTDNPDVNNYLLTLTPTELAEIETFSTKELPKGRASFAAETCRILADHLLNSDDSLADAIEKNFHRKPTVAQLTESTGIASVDRSLKIVSRFLQMARNYWGEPQAITVELAREGLMSAKAKAEMEFQQRRARKARQTLQEKRGIREDNRRDTLRAEALHRQNNRCLYCGAPIDMHSVEMDHIVPRSGPGATNRVTNLAGSCHRCNQAKGGRTYAEWVKQDHPTYTNRKMVDDFVNHSMNLENQALPKKSMQKEYLRALHTVGKEDALDSRSLAPTATMGTILRGRLEAEFPETKVNVLAGFITAEARHAAGYWGLPTLHIEGDPHDNNKRIDRRHHAIDAAIMSITRPYAAQVLAQRKALRDQEKTLGSSYRSATVSNFYGSWKDFQGTDIAHKTAYQRWLSNSQVLIGLVAEKLLNDDIPVWTPLRLSRTSGRAHEDEIRPLAHRPVKAALTAKEVDASATEAQWCALTRCEDYDEKTGLPENPERRIVINGTHLGPNDDLEFFTPKDNKKPDAICDQAALKVRDGWAAAGDFHHLRLYRIPQKKGFAYYFMRVLPFDLPTEGDLFSYELPPQSISIRQAHPKLKVALKKGEAVYLTWLVKNDVLEVDDKALSGVGKTLEEVIPNATRRWRVIGFDNMSAKIKLAPVLTSPEGVLGKQGGSSVDSRFDEATSGKLKQTVLAPNGWRPSAQVLMRGPLRVIRYDALGRERLSARSPLPFTLIIEP

SEQ ID NO: 9199 - protein, 1126 aa, synthetic construct
  REGION 1..1126: note = Synthetic
MQEKAGSKKSSGESRTDGATTWRLGVDVGDRSVGLAAVEYDDDLPVQVLAAVSVIHDGGTGGLNNKTKASRKAVYGVKRRIRRSRERRRRRLAAIDRLLEQAGFVLSSPTGASPLAPWLARRRLIESYVDDDLERAELVGRAISHIARHRGWRNPWISLRALEKLPVPSPGFTESIEALLAGPSPPAVAPRSIGELGALLSEMPGRRVSPSAHDASTQPPLLLQRPRQEDVVAELRRICAVQRLEDALTKDLVQAVFEQVRPSVPVERVGICPLSGEARALRCSLEFEEFRIREKIANLRYADDNGELHPLDSETAERVVSALLAWDEEPPTWADVALDLVGLDSEGQLVAPEDDRISGNAPIDHTSRAVRALLKSKSRTFPGFAVWWHNAGRQKRSDVICALVDATTSSVLEGFDAFPDDELTLLAEHLTVASGRAKYSRLALERLNARMRLDGVAFYEASRREFNLPADWHPPLPSLTEPTGQPTVDANIAAVRKFLASAALRFGPPAQITVEIAREGSKSPAKIQEDERRRRAGRAWNDQVRAELRASGIENPRPADVWKQTSIGLYDARCLYCGSALSWDGTELDHVVPRADGGVNLRANLAAVCVACNRKKGRRPFGRYAKETGVDLREVVARVRALRYEAGGPFSRTQFRAYQTDLCRRLRRVSADDEDARDIQATSYAALAVRERLQHYLDDHGIDEPVRVFSGGITAEARWVAGIRIAELLGRAGLPRGVHRKRIDRRHHALDAAILTTICHGTAMALAARRQERHEREFFLAHSDPGMESWKVAWDKGPGQTASLLRWLDKAHSLANLLGSAAIEDRIAVTRPLRLRPTGPAHAETIVPLKERRLGEDWGPEEILRVCDPAIYRALAAEVSRSGRLLTDLDRCLQLGHGRELTANDHVALFPGKDAMLRVPGGAVEMKVIHHARVYAWHDERGRVRYGLVRVFLADLASCGLLRDGIDVFQVALPDTSMSLRDAHPETNQRVRSGSAAYLGWLVAGDEIELAGPTSLPSTGHVSKFAAMFPERRWVVAGIEQPTVITLRPAYLAGEGLNPEADVPESVRAILGLPRGGKGWRPSVNVLLSAPGTAIIRRTALGRPRWHDGPFPSSWNVRDRVAALLQ

SEQ ID NO: 9200 - protein, 1108 aa, synthetic construct
  REGION 1..1108: note = Synthetic
MIETTNTTNTIVPNYQWILGVDVGQRSVGLAAVEVDENDFPKRILSAVSMIHDGGVGDEKTQQSRLAQAGVARRLHRLRRRRRSRLNKVDRLIKGLGLPLPPLSGEHPYAAWEARRRLVEEKIVDKEELNVLLGKAISHISRHRGWRNPWLSLSALQELEAPSAGLCDSITKAQQEYGITLEPGTLGQLGALLSKKPIFRMNPSDKANSKDPLLTTRTRQEDLIWELQLIWEKQNLNSDDLERIIEAVFSQIAPSVPKERIGTDPFDKGQVRAPKASLEFQEFRIRDKVANLRIIEGEEEVPLSQEQRTAVVNALLELREDRITWAEVALDILNLETEANLIVPEEQRISGRAPMDETTAVFERYLNEKKNLLEKTRRWWEQASREERSALVGVLVDSEDTDEMGITTKLPGDELTLLAELHLPAGRAAYGRRTLQQLNEKMSAEPLDLHEARKVCFGVSDDWHPPLPRLDEVTGNPTVDRNLAVVRKFLASAELRWGPPKRVVIEIVREAEKSPAQLMKDERMRDKRRKANDLDRRELIESGILQPTRADLSRKRLLSLYGSRCLYCGESITWEESELDHIVPRKNGGSNRFENLAAVCTNCNRRKSGRPFGLYAKQENINLNDILSRVDSLSYTKGGMWESRQELNSYKHAVKARLRRRSEDPEEILPIEPTSYAATALRDRLKCYLEALPSKPKLRVFSGGVTAEARWVLDINIAELLGRDGNNKRIDRRHHAVDAIVLTTLRQGVAQQLIKRRNLRTQQEFLLGKPSVDLSSWDKEVARQELFQDWLSRGRKLSDLLVEAVEKDSIPVMQPLRLTPRGQLHKETGEKLHSRKVGAAWSEVDIRKVVDHKIYQALTDLAGDVGELGEDEDRVLRVDGRDLIASEDVSIFPRDCAMMKVAVGAVEMGDIHHARVYAWRSRNGKISYGWLRVWLADLAACDLLKPGVDVFSVELPEWSQSWRHADPELRNAYKRETTTYLGWLVKGDELEFSSIEAFPGKGPIRKFLSHYPERHWVIASFEGPKTITLKPRYLSMEDVNTEKDVNTDDLGNGYQNILKRGWRPSVTTVFRSGKVVVIRRTSLGFPRWNSSHLPVCWNPSRQVKELLI

SEQ ID NO: 9201 - protein, 1116 aa, synthetic construct
  REGION 1..1116: note = Synthetic
MDKVIWRLGIDAGEKSVGLAAVQYSTNGEPEKILSAVSYIHDGGKDPDGQSSQSRKATAGIARRTRRLRQRRRQRLEELAGVLGELGCIVPKNNQPQTYEAWVARAWLVRGYIHDDLERRRLLGLAIMHMGHFRGWRNPWWSISKLSSLPVPSKNLETMAQVSSDKLGVPIESLRTIGELGALSQISPGLPLRPRQKKKGSQQPASVKGPDNTTAIPKIFFEQIRQEDILHELRLICETQLLDREFFEKVSEVLFKQNKPTVPEELVGRDPFDNSPRALRASLEFQEFRIRDKVANLRILRHGEKERLSPELHEQMVQYLLDWREDPPTWHEVAEHFGIGERSLSVEDTGDGVTPTKAPIDQSSCLIEKSQKLKTVNDWWKEADFSARSSLITYLADSVEVELPPVVLELFENLSDDEYIELEQLKFLSGRSSYGRDSLTRMNEVMKSNVCDLYQARTIAFNKDQYWMPPKATFAQITYQPAVDRNLAIVRRFLMASVEKWGSPDKVVIEHVREAFLGTEAINSLNLELSIRRKENDKIRDELKLQGIAEPHRSDILRRKLLQQQNSQCLYCGDTLDWESVELDHIVARASGGSSRISNLAAVCRQCNSEKGKRPFGLFASQTQRSEVSLEGAIKRVKEWHKVGNQLSNMQFRKYQADVIRRLKRISDDEPLDERSMNSTAYAAQAIRERIEQYLEPQPDFKITDRGQAVQVYNGRITDLARAASGLGPKLKLRGETSKTRLDRRHHAIDAIILTSLSPAVARVLIQRDDMRNSEMIRQGGHSSFKKYSGRSIGDQVIFARWLSTSAGLSDLIVGTVSKDEIPVVNPIRLRPEIGALHKDTVQSLVTKRLGDSFTVEETRRVIDRKIYLSLLDELNGRGILPADQSRTASSEGLIVLTADDPIQLFPASAAMLPVQEGAVELGAIHHARVYAWKTPKGKIAYGMVRVFGGEFGRIGFRKKRVNVFTKELPIWSESWRLAEPRVTAFISNGAAKQIGWLTIGDELDFGDPDKVPGNGAIQEFLKEFPETRWQIDGFESPSTLRLRPLYLAKEGLPEVSNKAIKTIVDLPGWRPSINVALSANSLSTIRRTALGRPRWESTSLPISWSPFQKANQALL

SEQ ID NO: 9202 - protein, 1128 aa, synthetic construct
  REGION 1..1128: note = Synthetic
MAISGSTNWRLGVDVGNRSVGLSAVQYSDDGNPVKILSAVTYIHDGGIDEEKVPDSRKAKAGVARRVRRMRKYRRGRLNALRHFLAESGFAPEVEEAPQTYDAWNARSRLSREYIADPKEREMLLSRAILHIAHFRGWRNPWKGIDSLKELPVPSQSLGEMLEFAKRKFVIDDDKAPRTIGDLGALNALSADIRVRPRVTVEGSIKKMRTEDRPLTSPLLFNQIKQEDVLAELELILEMQRIDEKLRAEIIRRVFDQKKPYVKADSVGKDPFDGSPRALRASLEFQEFRIRDKVANLRQKVDGVKMPLPLDVVNGMVDYLLNYRDEGPVYWSVLGEYFSIPEEQLSVEKSPDGSSLRAPINDTLRIIMGRSIPKVVTNWWGEASFDLRSELINYLADPVESELSPEVEDLFARMSDDDLGKLLNLKFASGRSPYGRETLRKLNAVMRDTGCDLYTARSDVFDAAPDWRPPLPSFDSQTGQPAVDRNLAIVRRFLMAATQKWGTPSRVVIEHQRDGFITPKKAREIENEQARLREENNELREELIASGIAHPRKYDIRKKRLLQLQNTTCLYCGDPITWETTELDHIVPRADGGSNRVSNLAAVCRRCNSSKGRMTFFAFATSGKVPSVSLEEAIARVRRWLKPEARFDKNRFEAYQNEVINRLRRKTFDEPIDERSFASTAYAAVEVRERIEDYLVRRCELDPKEAHKRVVVFNGRVTSLARKAAQFDRNVNLRGLGNKTRLDRRHHALDATIVTSLSAMVAQGLVVIDEKRQSLKEEGLPGWMSEEIGNLLSSELSSVYFRWLRNATDLAVLLGAYLDEDKVPVINPHRLTTRFGSLHKESIEPLTRVKLGSRLDSNQIRRVVNQSVYLALREIEALSGLDGGGVKKDSDREILLSRNSILGSNELIEIFPSRKKDGKKYEGGALKVSNGWVEMGFFHHARVFAWRDKKSNIKFGIMRIFAAEMAKIGLNSDVDLMTAPIPIWSESYRLTDPSVIHAIENLKAIQIGWIAVGDEFDFGSPDNVPGSGMIRSFLSEFPESRWSLDGIPMVSKLRLRPLFLAKEGLGENSTAESVSIIDRPGWLPAVGVAFGSPNLNILRRTALGNPRWESSHQPTSWNPFQRAEELLS

SEQ ID NO: 9203 - protein, 1120 aa, synthetic construct
  REGION 1..1120: note = Synthetic
MTTNVSLNWRLGVDAGNRSIGLSAVEYDHIGNPLKILAAVSYIHDGGIDEEKVPDSRKAKAGVARRVRRMRKYRRGRLNGLRKFLSENGIGIEVESAPQTHQAWIARSRLSREFVFDPDERAELLARVILHIAHFRGWRNPWKGIDSLRELPVPSQSLSEMLEFANRRFEFAEEDVPRTIGDLGALASRSTEIRVRPRVTVESSSKKTKVDEMPLTSSLLFNQIKQEDVLAELEAILEMQRVDDKLRTEIVARVFSQKKPYVKADAVGRDPFDGSPRALRASLEFQEFRIRDKVANLRHLVDGTKVPLPLEVANAMVDYLMNYRDSNPVYWNVLGELFSIAEEKLSVEKSPDGSSFRAPLNDTLRIMTSKTIPKTVTSWWAEASYDLQSELISYIADPVESELSPEIEDLFVRLSDDEINKIIGLKFPSGRSSYGRETLRKLNAAMRDHGYDLYTARSIVFDAPPDWRPPLPPFDSQTGQPAVDRNLAIVRSFLMAATEKWGTPSRVVIEHQRDGFISPSEARKIEYEQSRTRKQNDDIREELIASGITHPRKYDIRKKRLLQLQNTTCLYCGDPITWETTELDHIVPRADGGSNRVSNLAAICRRCNAAKGRDTFYQFANSGRIASVSLDDAIKRVRGWLKPDLRFNTEQFNSYKKEVENRLRRKTFDEPIDERSFASTAYAAVEIRERVEDFLIRRCALEPKEAHHRVVVFNGRVTSLARKAAQFDRNVNLRGAGFKTRLDRRHHALDATIVTSLSAMVAQGLVTIDEKRQNLKSEGLPEWQSEDIGKFLSTEYSSIYFRWLHQATNLATLLGDHLEADKVPVINPHRLTVRFGSLHQESIDPLRKIELRSAFDSETIKRIVDPYVYVSMKELETLSALKGGGVEFDAGREIQLPTRKVIGPEDLIEVFPFNEGGLKVANGCVKLGSFHHARVYAWRDRKGSIKFGILRVFAGEMAKIGLTAHVDVLTAPIPTWSESYRLADPGLIHAIETMNAVEIGWIAVGDEFDFGDPSNVPGSGMIRTFLTEYPEFRWSFDGFYSLSVFRMRPLYLSREGLDEAASVDITKIIDRPGWRPSVDVVLSVSRLAIIRRTTLGQPRWNGEHMPISWSPYKKALEALR

SEQ ID NO: 9204 - protein, 1120 aa, synthetic construct
  REGION 1..1120: note = Synthetic
MTTNVSLNWRLGVDAGNRSIGLSAVEYDDTGNPLRILSAVSYIHDGGIDEEKVPDSRKAKAGVARRVRRMRKYRKGRLNGLRRFLSESGIGIETEIAPQTYQAWIARSRLSREYVVDPQERAELLARAILHIAHFRGWRNPWKGINSLRELPIPSQSLSEMLEFANRKFEFAEGDAPRTIGDLGALAARSTEVRVRPRVTVESSSKKTKVEDIPLTSSLLFNQIKQEDVLAELEAILEMQGVDDKLRSEIVDRVFHQKKPYVKAEAVGRDHFDGSPRALRASLEFQEFRIRDKVANLRQLVAGNKVPLPLEVSNAMVDYLMSYRDPSPVYWNVLGELFSIPEEQLSVEKSPDGSSLRAPLNDTLRIMTSKTIPKAVTSWWAEAPYDLQSELISYIADPVESELSPEIEDLFIRLSDDEVSKLIGLKFASGRSSYGRETLRKLNAAMRDHGYDLYTARSVVFDAPPDWRPPLPLFDSQTGQPAVDRNLAIVRRFLMAATEKWGTPSRVVIEHQRDGFISPEEARKIEYEQSRTRKQNDDIREELIASGISHPRKYDIRKKRLLQLQNTTCLYCGDPITWETTELDHIVPRADGGSNRVSNLAAVCRRCNAAKGRMTFYTFANSGRVTAVSLDDAIKRVRGWLKPDMRFDQKQFKAYQDEVVNRLKRKTFDEPIDDRSFASTAYAAVEIRERVEDFLVRRCALEPKEAHHRVVVFNGRVTSLARKAAQFDRHVNLRGAGFKTRLDRRHHALDATIVTSLSAMVAQGLVTIDEKRQGLKSEGLPGWQSEDIASFLTSELASVYFRWLRQATGLAGLLGAHLDNDKVPVINPHRLTVRFGSLHQESIDPLLKIELGSSFDSSTIRRVVDPNIYLTLRELEVIAGLKGGGIEFDAGRDVVLPNRKVLHSEDLIDVFPFNEGGLKVANGCVKLGSFHHARVYAWKDKKGSIKFGILRVFAGEMAKIGLTDDVDVLTAPIPIWSESYRLADPGAINALETMNAIQIGWLTVGDEFDFGDPSDVPGSGVIRTFLAEFPERRWSLDGIPSTSRLRLRPLYLAKEGFDEGFSSESRAMVDRPGWLPAVGVVFSSPKLTVIRRTTLGQPRWNGDHMPRSWSPYKKALEVLG

SEQ ID NO: 9205 - protein, 1111 aa, synthetic construct
  REGION 1..1111: note = Synthetic
MTPLSQLPRYRIGIDVGENSVGLAAISYDDDDHVIEILSALSYIHDGGKLSGTDKAPLSRLAGAGVARRTRRLRRRARSRLKKLNLYLAEQSFPPELDSQTYEVWHARYQLIHGFIENEVERNSKLALAIRHIARHRGWRNPWWTFLQVQRAAEEKSPSTSLLKMWENVATKYKFPDDEICSVGVLGFLGVTQGNPNRRLRHSTAEDRKSRENVFFDRVMAEDNFSELSAILVEQKVDSQVSTQILKLVFEQKMPHVPKDRVGDDSLDPSQKRSTRAGLEFQRVRMLNAISNLRIVDAGTNRPLSPEEFEETLTFLTNWKDKSTKPNQSDVAHLLGLNPAKVKFPTWDENQGSIAFFDQTSLEIVNKFSEKDPLGAWWRRANFIEKSDFVDFVTDNSEESHEDDASYLHLLEEESTAEALGGLTLTSGRAAYSRKTYQRILLVMEEQHCSERDAILQVFQIKDDWQPPLPDINDPIEHPTVDRVLTVVRRFAMACNAKWGIPESITVEHVRNAFIGSSALAGLKYDVAQRTLKNDQIREELGASSLGRIRKADLRRYKQIQRQNSQCLYCGTTLIFESCQLDHIVPQADGGSNKEENLVAVCTHCNKSKEALPFFTWANSGVEPDVSLEGAVTRLKAWDRGKQSKTQWSRFLKNVEARLLLTSEDDSLDERSLSSTAYAALEVRNRLTSLYVNTLSLPLVKCPEIRVYSGVINSIARRSSGIDDFLQLRGKTEKNRLDRRHHAIDAAILTTINDSVAVTLAKKNWIKRSEESIGGKTTRWKEYDGSSPQYVQNYHHWKTTCASLADEVKRSIDSDRIAVVRPLRIGPSSGEGAVHDDTVRPLEVVEVNQGLTSEQVRRLSHPTLLNKVWDQLESDMSLTPENAVRVLGEKVKLFSGPAAQIAVRGGSCQIGNSVHHARIYAFRKKDGFNFGWIRVFAGEFPHIGFSKDGVDVLRQPIPYGSQAMLKANPTLLKLIQSGEAKEIGWITRNDEVEFDFSEKPLIPGESDDGILSSFMRIYPEKRWIITGLDSAVQLKISPSILSSEGLTKEHPELATSIISRRSYVKPSVNQFLLWPNLKIIRRSILGVPRWNDRGLPYSWEPLKAAQEIFGD

SEQ ID NO: 9206 - protein, 803 aa, synthetic construct
  REGION 1..803: note = Synthetic
MTPLSQLPRYRIGIDVGENSVGLAAISYDDDDHVIEILSALSYIHDGGKLSGTDKVPLSRLAGAGVARRTRRLRRRARSRLKKLNLYLAEQSFPPELDSQTYEVWHARYQLIHGFIENEVERNSKLALAIRHIARHRGWRNPWWTFLQVQRAAEEKSPSTSLLKMWENVATKYKFPDDEICSVGVLGFLGVTQGNPNRRLRHSTAEDRKSRENVFFDRVMAEDNFSELSAILVEQKVDSQVSTQILKLVFEQKMPHVPKDRVGDDSLDSSQKRSRRAGLEFQRVRMLNAISNLRIVDAGTNRPLSPEEFEETLTFLTNWKDKSTKPNQSDVAHLLGLNPAKVKFPTWDENQGSIAFFDQTSLEIVNKFSEKDPLGAWWRRANFIEKSDFVDFVTDNSEESHEDDASYLHLLEEESTAEALGGLTLTSGRAAYSRKTYQRILLVMEEQHCSERDAILQVFQIKDDWQPPLPDINDPIEHPTVDRVLTVVRRFTMACNAKWGIPESITVEHVRNAFIGSSALAGLKYDVAQRTLKNDQIREELGASSSGRIRKADLRRYKQIQRQNSQCLYCGTTLIFESCQLDHIVPQADGGSNKEENLVAVCTHCNKSKEALPFFTWANSGVKPDVSLEGAVTRLKAWDRGKQSKTQWSRFLKNVEARLLLTSEDDSLDERSLSSTAYAALEVRNRLMSLYVNTLSLPLVKCPEIRVYSGVINSIARRSSGIDDFLQLRGKTEKNRLDRRHHAIDAAILTTINDSVAVTLAKKNWIKRSEESTGGKTTRWKDYDGSSPQYVQSYHHWKTTCAS

SEQ ID NO: 9207 - protein, 1113 aa, synthetic construct
  REGION 1..1113: note = Synthetic
MTSPFRHLNYRIGIDVGEFSVGLAAIEYDDDDHAIELLSCLSHIHDGGKLSGTDKTPQSRLAVAGVQRRTRRLRRRLRARLKKLDAFLIEIGYPVGVNKPQTYDAWTARYELIQAFIDDPKIRNEKLSLAIRHIARHRGWKNPWWTYNQLRTAAIESTPTKSFVKMRENASEKYGFASEDIVSLGVLGYLGVTQANKNRRLRQSTAEAKKDQERIFFERIMEEDQYAELKSIFEIQQLPSDHSNKLLELVFSQKMPHVPKDRVGDDPLDQNEKRATRASLEFQQVRMLNAISNLRIRGNSADRRLHADEFEETFKFLTEWSNPAMNPNRNDVAHFLNINPAKLKFPTWDDDLGSSSFFDATSIEIEKKFKVKDPFGKWWNAATFLEKSDFIDFVTDTSEEDFQDDLPFLKFLEDESTMETIGKLKLSSGRAAYSRKTYARLIPVMLKDNCSEREAIKKIFNIGDDWRPPLPSIEDPMGQPAVDRVITIVRRYIMACTQKWGIPQSITIEHVRDAFMGPAALSALKYEISQRTKKNTEIRERLQASSSGKIRKADLRREQQIQKQNSVCLYCGTTLVFETCQLDHIVPQADGGSNRIENLVAVCADCNQSKGVLPFVYWARENSNPDVSMEKAIERLRDWDKGNFHNAQWSRFKKDVEARLRLESDDETIDERALASTAYAAVEVRNRIESYFSNDLKLAKGRMPSIRVYSGRINWIARRSSGIDGMILLRDKSEKTRLDRRHHAIDAAVLTTLNDSVSQTLAKKLQRKKSTEMTSSGDASWKDFEGSTPEAISKFRHWLDTCDSVGLLLKEGITHDKIPVMRSLRIKATSGEGSVHDDTVRQLEKAKTSDGLTPKQVRRIADRRLLNRVIDSLEEDFSLSATNAERLLEKEIGLFPGDAAQIPIRGGSCQIGNTVHHARVYAYRAKNGINFAWVRVFAGEFPQIGFSKVGVDILKAPIPFASQSMLKAHPNIVKLIASGQAKQIGWITQDDEIEFDPFSRISVDADEVDDGKIEKFLRIYPEKRWILTGLESGIQLKISPALLSAEGVSNELDQMVVNVISRKAYIKLHVNPFFQLANLKVIRRSILGVPRWKGAGLPYSWSPMQEAIRVLGE

SEQ ID NO: 9208 - protein, 676 aa, synthetic construct
  REGION 1..676: note = Synthetic
MKQSGKALNYRIGIDVGEYSVGLAAIEYDDDDHAISMLSCLSHIHDGGKLAGTDKSPQSRLAVAGVQRRTRRLRRRLRARLKALDTYLLEHNFPVGVNEPQTYSAWENRYQLVQGYIDDASLRNAKLSSAIRHIARHRGWKNPWWTHNQLKMAAENSTPSQSFIKMRESASEKYDLDVEAISSIGILGYLGVTQGNSNRRLRQSTAEEKKDRERIFFERIMQEDHFAELVEIFQVQQVDEAISTKILELVFDQKMPHVPKDRVGNDPLIPGEKRATRASLEFQKVRMLNAISNLRIREQGVDRQLQEDEYEKTLNFLNEWKDSTTNPNRNDVAHFLGLNPAQLRFPTWDEDAGSSAFFDATSIEIKKKFNSKDHLGKWWDSATFQEKSDFIDFITDKSDEDYQDDLPFLRFLEDESIMEQVSKLKLASGRAAYSRETYSRLIPIMIENRCSEREAIKLAFDISDDWKPPLPNIEEPVGQPAVDRVLTIVRRYVIACSEKWGVPQTITIEHVRDAFMGPAALASLKYEVAQRTKKNDELREHLQASSSGKIRKSDIRRERQIQRQNSVCPYCGTTLSFETCQLDHIVPQADGGSNRADNLVAVCTDCNGSKSALPFIYWAQNNKNPEISLEKAIERIRNWDKGNFHKTQWDRFKKDVEARLSLESDDETVDERALAS

SEQ ID NO: 9209 - protein, 948 aa, synthetic construct
  REGION 1..948: note = Synthetic
MAETNYPGKAKNSRTMGELVSRIVGTGAPIRPTSKSLGNTVGALMATQVRQEDSLFELRLIFETQQVPDNVADSICAAVFFQTKPHIPRDRIGRCALQPDQLRAPLASLEFQQFRIRDAAANLRVGREKRRLTESEYDIVVEMLTHWRDDIRPRWRDIAEKLDISARDLVDSSLDGSGGTYAPSDRTSTAVEVKFKRNSTVGAWWTTASAAERSELISIITDLSSEDGDIFSDSLQEFLSQETVLDPLAGLNEALESGRAAYSQETLNKLNSIMRETRCDLHTARKVAFGVDDSWRPPLPNFNDSIEHPTVARVNTLVRRYLMNVVDKWGMPDRVIVEHVRGGFLGPSALAELKNEIRLNTFRRDGVANLLRVQGIEHPSRTEIKRNECVERQNCVCVYCGSTITLLTCELDHIVPRASGGSSRLDNLVAVCRSCNAAKGKQPFAVFANHAPNEAISVHEAQLRVKAWQRVGMTSKSFTRLKANVSQRLSLSADDETDERSLESTAYAAREMRARIETFLVEQGKRHEVSAGQVLVFSGAATSEARKAGGIDDRIRLRTMTRKSRFDRRHHAIDAVVLTSLNLAVARTLKERSWLQRDNQFTGKEPGWKEYRGTSAKDQSAFNAWRERIGALAELLEATIRLDNIPVVRQLRLAPRVGSVHADTVQPLAYKSIGDAFSQDEVLRLLDRSLYMRLQEIAEGGDLEFDERRSELQRWASERPVALFPTSAAYLPVRGGAVTIGGTIRFAQIYAWKTKDGFNFGMVRLYVGEFPRIGFGGPGNDFLTTTPPAHSQAMRTANSALRQRIQSGDARLIGWIAVDDEIEIEPTYFQTDGTKLGEFLTLFPEKHWLITGIAEPGKIGIAPSYLAYEGVVTAADMERGGARSEHETPAAVSEVLKANRIPMSVNVILGSPGCNVLRRTVLGRPRWTGDSLPTSWNVLAAAEEAFEK

SEQ ID NO: 9210 - protein, 1087 aa, synthetic construct
  REGION 1..1087: note = Synthetic
VGIRIGVDVGEKSLGLAAIDYDDDGWPIRILAAVSHIHDGGMDPETAKSPQSRLATAGVARRTRRLIRNRRRRLQALDEMLRKHGFDVPSEEIPQTYEAWDARDRLSREFVTDDEERNRLLVLALRHLARHRGWRNPWSSYARLEQEPTPSAALTAILDKAKERYGEVAIDEAATLGQVVAGVARSRDSIRLTKAAKSAEQDPVILTQVKQEDSLAEAKLILQTQRVPETTIDEICRVLMFQNKPKIPKDRIGACALIPGEVRASLATLEFQEYRVRSTVANLKIGKAKQPLTPEQHDLVCEWLLAWRESDRPKWREVADLLGIPPRELPIPSVDDAHFAMAPVQRTYMTLESVFNAKSEIGSWWRSASQQDQGEFIAGIADLSGDDGELESANVAALMTSLTDKSREALDKLQLETGRAAYSREALRRLNEVMRADHCDAHTARKKAFDLDDNWKPPQPSFSDHIEHPTVARINILIRRFLTTAVEQWGMPERIVVEHVRGAFMGPSALAELKSEIRFNTARREKTRADLRIQGISEPRDADIRRNECVQRQNSQCLYCGTSIGLTTSELDHVVPRAAGGGNRRDNLVAVCKPCNAAKGKLPFAVFADQSQNPEITVEAAKTRVRSWQKLPGVTPRQLSTLKTDVQYRLGLVADDDDFGDRSIESTAYAAREMRARIQSFVLERGGDPNSVWVFGGAVTSEARKAGGIDGMMRLREFTKKSRFDRRHHAIDAAVMTSLRPAIAETLRHRTNLQNENRMTGKYSNWKEYRGQQPGDEVNFEEWKQRVGLLAELLTQHIRDDRVPVMRQLRLSPRIGSVHADTVEPLEHRLINGPFAKEEVRRVVNNRLYESLLEESAGKDLEPDSERGGRLHWAAERIVDLYPSTAAFIPVRGGAVAIGSTVRYARIYAWRIKAGFAYGMVRMYVGELALIGLLAPGVDLFTAPLPVYSQAMRTANPALVARIVSGEARQIGWVSIGDEIEIDPENFLVGEGKIERFLKEVPEKHWLISGFFDPAKFSIAPALLASEGLDETMPEIVRQVVADNRIPTAVNVLLGSPECVIVRRTITGSVRWRSEGLPIAWKPREAA

SEQ ID NO: 9211 - protein, 1096 aa, synthetic construct
  REGION 1..1096: note = Synthetic
MRYRIGVDVGDKSIGLAAVEYDEAGFPIRILSAVSHIHDGGMDPETAKSPLSRTATSGVARRTRRLIRNRRRRLARLDQLLMTHGYIVPEVEIGQTHDAWSARARLSKEYEPDNKTRINDLSLCIRHIARHRGWRNPWWKWSTLRDFEGPTENFVSMRESAAVRFGPELLSCDTLGQLVMQIASSGVPVRATKRATTRGVEPLMSKQIMQVDSLFELRKILAMQKVTTDTIDSICAEVFSQEAPHIPKDRIGLCALIPSEVRAPIASLEFQEYRVRAAVANLRIGRRERLRLSEQMHDTVVEFLMNWRDDDRPKWSDVSDYLSVEARDLIKPSIDEEGGTNAPHDRTRNGVEKQLKKKTPLREWWDSAVFADQAEFVDFLTDLSGQDFEPSSNVLAELISDDAHVETLEKITMAESGRAAYSRIALQKLNDVMREKHCDVHEARKIAFGVADDWQPPKPTFNDIVGHPTVDRVNVIARRFLSTAMMKWGEPEIVAIEHVRTAFMGPTGRAELLQEIGFNTRKRDKQKAELVSQGIQNASNVDVRRLECITLQNGMCLYCGTALTMTSCELDHIVPRASGGSNRRDNLVAVCVECNKEKGRDPFPVFAAQTHRNGVSVEEAKLRVRAFSKGSLTVLQLKRLQRDISKRLSLETDDEEGMDRSIESTAYAARELRKRIESLLGITGTSISDPDKARVVAYQGIVTSEARKAGEVDGILRLRSFTKKSRLDRRHHAIDAAVLTTLSIGVAKTLKDRAELASSDRFTGHDPGWKEYIGRNGQEMKQFTEWKKHIGALAKLLKGSVENDKVHVVRQLRLVPRVGAVHADTVQKLVHKNIGEEFSSVEIDRVTSYSLFDKLSLLTDDSGNLPTDPARHLALKLPADFEVDLFPSSAACLAVRGGAVEIGGSIKSARIYAWKAKSGFAFGMVRVYSAEFPKIGFLKSGIDIFTAPLPANSQAMRHANDSLRRRIESGDAKQIGWIAIDDEIEINVESFNEGEEKLPKFLQACPESRWVIKGFFDMGKISIVPSYLAAEGIDVDVPEIVQQTLREGRIPTAVNVLFSDPHTTIIRRSVLGTVRWRHDGTSSSWNPHQAAKKIFD

SEQ ID NO: 9212 - protein, 844 aa, synthetic construct
  REGION 1..844: note = Synthetic
MDPETAKSPLSRIATAGVARRARRLVRNRRRRLQRLDVLLNDLGFVLPQAEVPQTHDAWVVRSKLSREFEPNEQVRNHELLLAIRHIARHRGWRNPWWTWRRLEEAPVPSENFAAMLVDANERFGSRVAGCATLGQLVHSIASSGAPIRRTKKTEGTGNSPLMSRQIMQEDSLSELRLILATQKLSSEDSDKICAEVFSQEKPHIPEGRIGRCSLDPNELRAPLAALEFQEFRIRAVVANLRLGRSGTKLSDEQHDLVVNFLTNWSSSDRPRWADVAELLGVTSRELRQPSIDSEGGGAAPCNRTVLTIEKHFKEKSAVRQWWKTASQNDRSEFVAIVTDLTGVDVEPSSESLAEFMTTWDETIQESIDKLDLESGRAAYSRATLSKLNAVMRESRCDVHTARKVAFGVADDWQPPKPTFNDPIEHPTVGRVNVLVRRYLSTASQKWGAPESVIIEHVRGAFMGPTALRELENEIKNNTRRRDEIKTRIVAQGVENPTNTDVMRHELIERQNGTCLYCGTSIGMKSCELDHIIPRATGGGNRRDNLVAVCRECNGEKDKLPFVEFAKSCTRPGVSLEEALSRVRNWEKGRMTFDQSKRLKRDVSKRLAMSADEVEEVRSIESTAYAAREMRQRVESFLGITSSSVPDETESRVFVFQGLITSEARKAGGVDDQLRLRSFTRKSRFDRRHHAIDAAVITTLDASVARILKDRAEMQSVQRMTGHEPGWKDFKGRTPEQQKRFAIWESQIGELANLLVSAIAKDKVAVVRPLRLVPRVGSVHKDTVSKLISKPINDEFTEDELLRIVNARVLEKLLPLANVKGGLDASADRKSQLGLKTDEIQLFA

SEQ ID NO: 9213 - protein, 1096 aa, synthetic construct
  REGION 1..1096: note = Synthetic
MKYRIGIDVGEKSVGFAAVEYDDNGAPIKILSAVSHIHDGGMDPETAKSPLSRIATAGVARRARRLVRNRRRRLQRLDVLLNDLGFVLPQAEVPQTHDAWVVRSKLSREFEPNEQVRNHELLLAIRHIARHRGWRNPWWTWRRLEEAPVPSENFAAMLVDANERFGSRVAGCATLGQLVHSIASSGAPIRRTKKTEGTGNSPLMSRQIMQEDSLSELRLILATQKLSSEDSDKICAEVFSQEKPHIPEGRIGRCSLDPNELRAPLAALEFQEFRIRAVVANLRLGRSGTKLSDEQHDLVVNFLTNWSSSDRPRWADVAELLGVTSRELRQPSIDSEGGGAAPCNRTVLTIEKHFKEKSAVRQWWKTASQNDRSEFVAIVTDLTGVDVEPSSESLAEFMTTWDETIQESIDKLDLESGRAAYSRATLSKLNAVMRESRCDVHTARKVAFGVADDWQPPKPTFNDPIEHPTVGRVNVLVRRYLSTASQKWGAPESVIIEHVRGAFMGPTALRELENEIKNNTRRRDEIKTRIVAQGVENPTNTDVMRHELIERQNGTCLYCGTSIGMKSCELDHIIPRATGGGNRRDNLVAVCRECNGEKDKLPFVEFAKSCTRPGVSLEEALSRVRNWEKGRMTFDQSKRLKRDVSKRLAMSADEVEEVRSIESTAYAAREMRQRVESFLGITSSSVPDETESRVFVFQGLITSEARKAGGVDDQLRLRSFTRKSRFDRRHHAIDAAVITTLDASVARILKDRAEMQSVQRMTGHEPGWKDFKGRTPEQQKRFAIWESQIGELANLLVSAIAKDKVAVVRPLRLVPRVGSVHKDTVSKLISKPINDEFTEDELLRIVNARVLEKLLPLANVKGGLDASADRKSQLGLKTDEIQLFAERAAAIPVRGGSAEIGSTVQHARVYAWKTPKGFSYGMVRMFTGEFARIGFLKAGIDIFSEPMPVTSQAMLRADSTLRKKIESGEAKQIGWITVGDEIEINVEAHKNAGGNLGEFLKVISDERWTITGFFTTKQISIAPRLLASEGIDEEGTPQLIKQVLFANRIPMSINVIFGQSNFAVIRRSILGTVRWTGAGAPVSWVPEVEARKAFGE

SEQ ID NO: 9214 - protein, 901 aa, synthetic construct
  REGION 1..901: note = Synthetic
MSDKDGKNEEQTKMKKYLEDNLKSYKTQSVPNKFRTYGEYQLSIYKAEGKIHNKDGEYTHSVYRELIRDEAKTVLISQQRFNKKITDKFIADYLDLLYSQTSFEDGVGFNIENMFAYCALEPDQKRAPKTNFYAEISNALDTLENVNINGKYLDYDTICSTMNDLLRCGESLNVKDLFGTKHSFKIDMPFYNVMRQCLKFDPINFPITDKSQKVIDEINNISFILSRYKTPANRVKYLDYSQEILDKLYQIDGNGTNSYSVKAYKKLIPLMQSDFGTKRMNISIARDILHPVIEDVIDERPKFINKDVLDACMTNVNNPVVKTAIHNTSWMYNQLVTKYGIPYNVCFEMARELARTVQEKKDANKINKENKQLNDESDEYCKSHNVTANFNNRMRYKLWKEQNHKCMYTGQEISEDEIFDCEIDHIIPRAIGGMDKITNRVLVITKANREKGKKTIIEYLNSPGDHLTFEQFKTAVESNDSICAYKKKRLLLDYDASQLLQANLKDNITDLQHTQFGNKVMIKILANVQHTGKIVPLKGAMTAEMRSKWIYEYTSNDFPFDTDNLFINLKKDGGKGKDRTDLRHHAMDAIIIGCFSFSLVQKFYDYYKHQDEGTDARLKDTLPYPYFTAELVLHLADHILTDEEKEFLKNKLHYNGESIAKMKPFFVYRKELGKCHGAIHKDTIYKQVGDYYIKRMTLNSFFCKGNKLKAEDELFDADKHIIDNAYNDTLVESAIYSAYKRLQSIKLTKDGLPADFKVYKTQDGLDDKNHNTNTIKHISIAKPIIQNMIPVRNGLALSNTLSYWRWYTGQFKKKQKSFFLPIYVGNTAHTDVEFDAQAQQLAAKLKITNIHFVKELYKNSLIQCKGHSYYLHSGGAIISQTFYCYDAIHSDPVTISAFNVI

SEQ ID NO: 9215 - protein, 1112 aa, synthetic construct
  REGION 1..1112: note = Synthetic
MENNNLVLGIDVGITSVGWGIVKTRSEGPTDYLIVDHGVRLFEEAKLAADRRGIRSTRRVKRRKRQRLDDLRELLVRNQIIEKDFRPLNNPYDIRAKGLSEKLSNAELATALLHIAKRRGPDFETIEESDAKLSESQSTKSQLSKNRQRLNELKYVCLVQLERLKEIGKIRANDNTFTSSDYKNELSKILEVSNIENNLAQEIIEIILRRRSFEHGPGSLKSPTEYGRFKPVEGDLKDEIYDFLLEDSRFLKDSFIFDYKNKEYFINKSGIIVNNKPYNLVDLMRGKCSLFPNEYRAPKQAPSAMKFNLINDLVNLRISTQGDRRLTKEEINKVLDYLKKELRFTKGVNTLLKILNLEDDIVTGFRIDTKDKEIITDYEFIHSKFKSLELTEQEREVLNNISLLDHIAEILTNTKTVESRIDELSKVVDDNLAEKLANLTGFSMYHSLSFKAINELIPEMIENQANQQEIITRTYRNNDTIKELKFDEESILSPATKRSHRQAINVIKELINKYGNFDSIVIETARESNSKAERDSIRDSQKVNKKRRDDALNLIKERYGDEIESQVNITNTLINKIMHYIEQDSKCIYTGDVIDLYSLIFDPTAYEIDHIIPYSISRDNSYNNKVLVTSFANQQKVNNTPFMAYKKGLFTSSKINNYELFKDMVNSNKKIHRDKKANLLFEKDINSYTVQQSFIERNLNDTRYASRSILNTLQEYFISNDIKTKVYAVRGKNTSYIRGIGIKRWRNEDVKSPLIKDRNKHIHHAIDALIVAGLSRQEYFNARPHIYKYNDLYREKEVITPISYNIERDSYITKLINELNLINYTDTKVSYKIDQMPNKQFFDQTIYSTRNIDGKDFTLRKIKDIYSLTSKDIEDNIIKNKEKLLMYNQDIKTYDLMVQAYEQYKHEKKPFEAFKINNDGVGIRKYSKKGNGPEIKSLRYVDKGLGEHFDISHKYDVKDGKKVVQLSLNPYRADIYKLENGSYKMAIIRYSDLRQLDNERYIIDEEIYNNILSSVGIDKGDQFQFSIYKNTIIKYYTNDEELTYRAIGFSGNRIEVKGLYENYGRYNSEGNFVMDRVRITIGAKNPKKLEKYNVSIIGQTSKVESEPLQLII

SEQ ID NO: 9216 - protein, 1109 aa, synthetic construct
  REGION 1..1109: note = Synthetic
VKKILGLDLGIASVGWGIINDQYEVIASGVRLYEEANSENNAKRRSQRSMRRLKRRKTERIKRVKQYLIDMGLIDISFKPLSNPYQLRVKGLTEALSSKELATVLLHIAKRRGSSLETVEGDVSSNEQSPKTILSKHDKELEIYGYISKIQVENLRSLGKIRGIQNVYRLSDYVDEALKIMKNSHIDESHQHAICDLIQQRRHYSHGPGSRFSPSPYGRFRELNAEEKTKVMSALKQSVFFGDYNKKTIKFEYENEYFTILKDGRVINYEPLNLIEMMRGHCSVYPNELRAPKKSPSAELFNVLNDLNNIKITNREEQKITVEEKNKIIETLKTKGDFTPKGIKGLAKLLVTDIEHLEGLRIDSSDKKIISSLEGFNKFRKIFQTNTQIIGDFNVLDRISEILTSTNVISERQEQLNQLGLLSNSEIEQCVNLTGFSQYHALSLKAIYELNTEMLLTSLNQQQIIVSRNQEDTQQKPSLDFTDEILNPVARRTQHEAMKVVIELIHEFGPFDDIIIETTRSKNSKEEANQIKKQQKKNKEQRDEVIQLLVDSGYQEDQINSQLILKLRLYNEQQGKCAYSGSSIDINRLIKDPHAYEIDHIIPYSISLDDSFYNKVLVLSDVNQLKGNRTPFAYFLSGKVYKNGPIQTFEQFRNFVQSNGSYEPLKKKQLLIEKSLTRFEEMEEFINRNLNDTSYAIRVFMSKLKSYLSYYGYNTKVKTIKGKQTNLFRKIGIQEWQRKYQTAFNRCPLIKDRKQHMHHAIDALIIAGLSQQKIFNFYYSLQAKDDKIINRYTGELFEYDPMGDSQLIKYLLTLSKIESSQIRFSWKRDSKPNRRFSDETIYSTRLIDNEDVVVKKHKNIYELDNEKLESIFYDEKKKTKLLIYKHDPKTFDIMKSIYDQYKHEKYPFKVYKDNHGPIRKYAKNNQGPEITSMKYLEDNLGNHMAITHKYTGGIDRTKHNKKVVMLQVSGYRIDIYANSNNQYRFVTVRYIHLKKSKNEYYIPQDIYQKLKEDKGIDDSYKFKFSLYRNDLFEVIKVDKNGESQLESYRLISVANDSTNKIETQYVHAKPDKRIMISIGKSIQEITKYNVSPAGRKQRVINEDLLLKIN

SEQ ID NO: 9217 - protein, 1064 aa, synthetic construct
  REGION 1..1064: note = Synthetic
MENNYILGIDLGITSVGFAVVDKDSLDIIKYGVRLFDERDSEDNLNRRTKRGQRRLKRRKLERIVEIKRLINNNILKISDLTNLSNITDIKIKGLSNKLSPNELANVLINYAKRRGSSLDVVIDEDDKEGGEMSTSLSNNTKALVKDNIYICQLQKRWLEEGKLRGHKNVFRSEDYVKEIKKILSNQGLSSEINDKIIKIISRRRHFSEGPGDINSPTKYGRFKGEYDEQGNPIIHNLIDDMRGKCSIYPNEFRMAKNAYSACLFNLLNDLNNLTIIDNGVKRKITKDEKLAVIKHVNTKGNITFKELIKILKVDIDSIQGYRIDKKEKPLITTFDLFYKVKKIFSSFGNDKIEPLLVDDIAEVLTKTLIYEERFNGIKNIFENANINVSDAIIEQISNISKINGYHSLSKKAILEINEIMLEESKNQQEIITANSLGDKISFEGKANIVFDNSLILSSVARRAHLEAIKVINELRHEYGEFAKVVLETTRDKNLKEQRQSLIKIQAANEQANKEAEKIATENGIGLDKLNSIKKLKLRLYKEQEGKCIYTGKPIDLNRLLNDDSAYQIEHIIPYAISFDNSYMNKSLAEADANQLKGKNTPFYYFKSGKAYGNIRTFDQFKIWVESLNMPQRKKYNLLTMEDYSKWSNMEEFVNRNLNDTSYAIRSLMNTLQNYYRDNNINTVVRTIKGKQTSTFRSIGGVKKDRDFYIHHAIDALIIAALGSSQTISKAYYKETFDSETGEILVDPLDDQRIRKFLKTLKKINDDFVLHPDYSIFSYKIDTKVGRQISDETIYSTRKVDGKDWVVKKYKDIYGKEGESLTGLFEKGESTKLLMYKNDIETYNIFKKIYEEYKNVTVDGKKVKNVFAYYYELTGEKIRKYSKKNNGPIITSVKYVNEILGNHIDISKNYNTKDKKVVKLQLSPYRTDIYKNADGVYKFVTIRGYHVKQVKDGFEINKNLYESLKASKGIDDTFEFMFSLNRNNIIMIRKDGEDNYYKFIATNNDLASTIECKYISMATKDYEKNSVKRLIVSIGAKIELIEKFNVSPAGKWSKVYKETLKLKY

SEQ ID NO: 9218 - protein, 1064 aa, synthetic construct
  REGION 1..1064: note = Synthetic
MENNYILGIDLGITSVGFAVVDKDSLDIIKYGVRLFDERDSEDNLNRRTKRGQRRLKRRKLERIVEIKRLINNNILKISDLTNLSNITDIKIKGLSNKLSPNELANVLINYAKRRGSSLDVVIDEDDKEGGEMSTSLSNNTKALVKDNIYICQLQKRWLEEGKLRGHKNVFRSEDYVKEIKKILSNQGLSSEINDKIIKIISRRRHFFEGPGDINSPTKYGRFKGEYDEQGNPIIHNLIDDMRGKCSIYPNEFRMAKNAYSACLFNLLNDLNNLTIIDNGVKRKITKDEKLAVIKHVNTKGNITFKELIKILKVDIDSIQGYRIDKKEKPLITTFDLFYKVKKIFSSFGNDKIEPLLVDDIAEVLTKTLIYEERFNGIKNIFENANINVSDAIIEQISNISKINGYHSLSKKAILEINEIMLEESKNQQEIITANSLGDKISFEGKANIVFDNSLILSSVARRAHLEAIKVINELRHEYGEFAKVVLETTRDKNLKEQRQSLIKIQAANEQANKEAEKIATENGIGLDKLNSIKKLKLRLYKEQEGKCIYTGKPIDLNRLLNDDSAYQIEHIIPYAISFDNSYMNKSLAEADANQLKGKNTPFYYFKSGKAYGNIRTFDQFKIWVESLNMPKRKKYNLLTMEDYSKWSNMEDFVNRNLNDTSYAIRSLMNTLQNYYRDNNINTVVRTIKGKQTSTFRSIGGVKKDRDFYIHHAIDALIIAALGSSQTISKAYYKETFDSETGEILVDPLDDQRIRKFLKTLKKINDDFVLHPDYSIFSYKIDTKVGRQISDETIYSTRKVDGKDLVVAKYKDIYGKEGESLTRLFEKGESTKLLMYKNDIETYNIFKKIYEEYKNVTVDGKKVKNVFAYYYELTGEKIRKYSKKNNGPIITSVKYVNEILGNHIDISKNYNTKDKKVVKLNLSSYRTDIYKNADGVYKFVTIRIYHVKQVKDGFEINKDLYESLKASKGIDDTFEFMFSLNRNNIIMIRKDGEDNYYKFIATNNDLDNVIECKYISMATKDYEKNSFIRLRITIGAKIELIEKFNVSPAGKWSKVYKETLKLKY

SEQ ID NO: 9219 - protein, 1095 aa, synthetic construct
  REGION 1..1095: note = Synthetic
VKKILGLDIGITSVGWGIVDSNTNRIIDFGVRLFDESDSENNLKRRGYRSNRRILRRRKQRILDMKELLIRNKIITKDFLPLTNPYQLRLKGLNEKLTNEELATVLLNYAKRRGSSLETVEESVSSSEQSAKYNLSINQEALKEKSYIVNVQLDRLEKDGILRGHQNNFKTTDYLIEVEQVLKNQNLSKEFNDKIIEIIKRRRHFSEGPGSLYSPSPYGRYRNLEGDDLEEIKNILKSQYSNQYLKKNFNIEHKGKTYFIFKNGNVVNKDPLNLIALMRGKCSIYTEELRAPKNSFSAELFNFLNDLNNLKFTNREEKITKNEKESLINHIRTKGSLTFKQLLKHLNVEEVDVSGFRIDKNQKPLITDFSGYKKILKIFNDLDKEVYDDQTIDKIVEILTETVVKEERVERINFLINDDIISEKLSELTGINGYHSLSLKAIYKLNNEMIEEPLNQQQIITNLNLRTTDSVPKLLLDESAILSPTAKRAHRETLKVVEELLKEHKYFEKIVIETTRDKNSSEERKRINDLQKHLEQTRKEAEEILGDFAPEYAKGSNILKLRLYKEQEGKCAYTGETIDLSRMISDPYSYEIDHIIPISVSYDDSFNNKVLVLPSANQAKGNKTPFGYFNSSNVLSKYKIKNFETFESYVLNNKNYKNNKKRNLLFKKDITKFEVLKEFINRNIVDTSYAIRSIMTTLKNYFSYHEVDTHIMTIKGKQTNLFRKIGRNLWNMKYPNSNLENPLNKDRDQYKHHAIDALIIAGLSNQKFIRKLYDISEKDEILYDRKTGEIINLDDPTQNHTMNNFLLEVANIKDEDVKFSWKIDTKPNRKLTDETIYSTRLVNDQHVVVKKYNDIYNLTKEQLEKILSEEGRQKLLVFKHDPKTFEIILNAFNQYKHEKKPLLAFKQEHGSIRKYSKKNNGPEIKALKYLEDNLGFHLDITPNSSVNKKVVKLQLSPYRADVYYSENEERYRFVTIRYTNILLGSEGYYIDENWYNEELKIKLIDNNYKFQFSLYRNNIIDLHREDKNVINIERYRFLTVNNDIKNTFEVKPLSNYERKQLMITIGMKIKKIIKYNVSVTGKASKVIKEDLKLKL

SEQ ID NO: 9220 - protein, 950 aa, synthetic construct
  REGION 1..950: note = Synthetic
NNYVVNVQLDRFKENQQIRGTNNVFKTEDYLNELKEILKHQNLGEELNKQIISIISRRRHFSEGPGSINSPTKYGRFREVEGETLQEIKKYLNREYQNKYLKEKFNFKFENKEYVAFKDGRITNAKPYDLIALMRGYCSIYPEEVRAPKMAFSAELFNLLNDLNNLKISNRISEKITNEEKEAIISQVRKTGNLTVNNVLKYLNADILEVSGFRLDKNEKPQISEFKGYKKLLKIFKKLDLEMLEDKKLDQVMEVLTETVIEEERFEKINKIVGNKILAQELSILTGVNEYHSLSLKAIYELNEEMLNTSLNQMEIITKSGLRKPKQIKKLSLDETAILSPVAKRAHREALKVVEELINEYGNFDRIIIETTRDKNSADQRRRIREIQKYFENSRKEAEEVLGDYAQNYINQANILKIRLYKEQDGKCAYTGKPIDLLTLIKDPYAYEIDHIIPLSISLDDSYNNKVLVYPSANQAKGNNTPFKYFQSGYKIKDNPISSWEQFETIVNNNKNYSRLKKQNLLFLKDITKYSTIQEFVNRNFVDTSYATRSLMTTLKNYFQSNEVDTKVFTIKGKQTNLFRKIGRSIWNYKYPNNDFNPFVKDRDKYIHHAIDALIIAGLSNQRHLRKLYELDFDENEEYYISRRTGEVFDGLNNDEITKYLLKVSKIKDEDVNYSWKIDTKPNRSLSDQTIYSTRIKDKEHHVVKKLDNIYELDDKKLKTYFEGKNREKLLVYQHDKKTFEKLEKAYLQYSHEKYPFQAFYEDHGYLTKYAKKNNGPIIKSLKYLDKRLGNHLDITPGSAKDKKVVKLQVSPYRTDIYYNKELNNYKFVTVRYSDMLEQNKKYVINKKWYENEKLNKKINSDYEFKFSLYRNNVLGIHKQEKDHLIKTIARFVATKNDKTNVIELKSINKYDSNRLVETIGRKTIKINKYNVSVTGKVSKVTKERLKLII

SEQ ID NO: 9221 - protein, 949 aa, synthetic construct
  REGION 1..949: note = Synthetic
LKKILGLDIGITSVGWGVIDENNNIIKTGVRLFDEALAANNVDRRTFRGGRRLIRRRNQRILDMKELLVRNNIVDDDFTPTKNPYKLRLKGLSKKLDNDELATILLHLAKRRGSSLEVVEEDSTSNGELSTKAILSKNEALLKENNYVVNVQLDRFKENQQIRGTNNVFKTEDYLNELKEILKHQNLGEELNKQIISIISRRRHFSEGPGSINSPTKYGRFREVEGETLQEIKKYLNREYQNKYLKEKFNFKFENKEYVAFKDGRITNAKPYDLIALMRGYCSIYPEEVRAPKMAFSAELFNLLNDLNNLKISNRISEKITNEEKEAIISQVRKTGNLTVNNVLKYLNADILEVSGFRLDKNEKPQISEFKGYKKLLKIFKKLDLEMLEDKKLDQVMEVLTETVIEEERFEKINKIVGNKILAQELSILTGVNEYHSLSLKAIYELNEEMLNTSLNQMEIITKSGLRKPKQIKKLSLDETAILSPVAKRAHREALKVVEELINEYGNFDRIIIETTRDKNSADQRRRIREIQKYFENSRKEAEEVLGDYAQNYINQANILKIRLYKEQDGKCAYTGKPIDLLTLIKDPYAYEIDHIIPLSISLDDSYNNKVLVYPSANQAKGNNTPFKYFQSGYKIKDNPISSWEQFETIVNNNKNYSRLKKQNLLFLKDITKYSTIQEFVNRNFVDTSYATRSLMTTLKNYFQSNEVDTKVFTIKGKQTNLFRKIGRSIWNYKYPNNDFNPFVKDRDKYIHHAIDALIIAGLSNQRHLRKLYELDFDENEEYYISRKTGEVFDGLNNDEITKYLLKVSKIKDEDVNYSWKIDTKPNRSLSDQTIYSTRIKDKEHHVVKKLDNIYELDDKKLKTYFEGKNREKLLVYQHDKKTFEKMEKAYLQYSHEKYPFQAFYEDHGYLTKYAKKNNGPIIKSLKYLDKRLGNHLDITPGSAKDKKV

SEQ ID NO: 9222 - protein, 1094 aa, synthetic construct
  REGION 1..1094: note = Synthetic
MKYFLGLDIGITSVGWGVIDKNNNIIKCGVRLFDEADQKNNADRRAFRGSRRLIRRRKLRIDDVKSLLMEKGLINNKFKPFKDPYKLRKKGLTEKLTDKELATVLLFYAKRRGSSLEVAEEITTKSEESTKFILNENKQLLKKEGFIVDVQLKRKKELGSIRGINNVFKTEDYLYELKAILNNQNLDENFKKELIEIIFRRRHFSEGPGNLYSPSPYGRYRLVEGKLLKELKEYLITNFNNKYLKEEIIFNYEGKNYLAYKNGEIVNKDKYDLIALMRGNCSIYEDEFRAPKNAFSAELFNLLNDLNNLKFTNREEKITGEEKHEVINVIREKGNITFNQLLKLLGVTLIDVTGYRIDKNDKPILTEFNGYKKVLKIIKDLKKKMLDDETIDQIMEILTETVVVEERFDKINRIVKDELLAMSLSNLTGINGYHNLSLKAIYQLKEELLITSLNQQQIITNKNLTQKTDSSKLVLDESAILSPVARRAHREALRVVDELSKEYGTFDTIIIETTRDKNSADQRKRIRDTQKYFEKSKKEAEEVVKDYDMEVISSSLILKLRLYKEQHGKCAYSGKSISLGTLIRDHQTYQIDHIIPLSISFDDSYNNKVLITALENQRKANKTPFGYFVSGMVDKNNPINNWNDFETTVKGNTNYSSVKKRNLLFKKDISKYEVLEEFKNRNIVDTSYAVRSLMTTLRNYYQSNEIDTKVRTIRGKQTNHFRKIGANLWFHKYQNSKEVNPFLKDRNKYIHHVIDALIIAGLSKQNYLRSLYRDKMSLNDDLDEITKAILNIDSPYNDPNLKQYLLQIASLKEDEINYSWKIDTKINRTLADQTIYSTRIVDDVHRVVKKYDNIYELNNERLEKVFSEKQRENLLVFKHDPQTYEILYKAYMQYAHEKYPFKAYYEEHGFLQKYAKNNNGPVIKQLKYLEDKLGSHLDITPQGAIDKKVVKLQVKSYRADIYYSKKENRYKFITIRHSDIVLRKGSYLIEEDWYNKEKKKKEINESYQFLFSLNRNNIIEITKLDKKDKIVEISRFIGVNNDIANKIEVKPLNYYEKKRLMPTIGRNTLKIRKFNVSLTGKIAEAVNEPLKLVF

SEQ ID NO: 9223 - protein, 1094 aa, synthetic construct
  REGION 1..1094: note = Synthetic
MKYFLGLDIGITSVGWGVIDKNNNIIKCGVRLFDEADQKNNADRRAFRGSRRLIRRRKLRIDDVKSLLMEKGLINNKFKPFKDPYKLRKKGLTEKLTDKELATVLLFYAKRRGSSLEVAEEITTKSEESTKFILNENKQLLKKEGFIVDVQLKRKKELGSIRGINNVFKTEDYLYELKAILNNQNLDENFKKELIEIIFRRRHFSEGPGNLYSPSPYGRYRLVEGKLLKELKEYLITNFNNKYLKEEIIFNYEGKNYLAYKNGEIVNKDKYDLIALMRGNCSIYEDEFRAPKNAFSAELFNLLNDLNNLKFTNREEKITGEEKHEVINVIREKGNITFNQLLKLLGVTLIDVTGYRIDKNDKPILTEFNGYKKVLKIIKDLKKKMLDDETIDQIMEILTETVVVEERFDKINRIVKDELLAMSLSNLTGINGYHNLSLKAIYQLKEELLITSLNQQQIITNKNLTQKTDSSKLVLDESAILSPVARRAHREALRVVDELSKEYGTFDTIIIETTRDKNSADQRKRIRDTQKYFEKSKKEAEEVVKDYDMEVISSSLILKLRLYKEQHGKCAYSGKSISLGTLIRDHQTYQIDHIIPLSISFDDSYNNKVLITALENQRKANKTPFGYFVSGMVDKNNPINNWNDFETTVKGNTNYSSVKKRNLLFKKDISKYEVLEEFKNRNIVDTSYAVRSLMTTLRNYYQSNEIDTKVRTIRGKQTNHFRKIGANLWFHKYQNSKEVNPFLKDRNKYIHHVIDALIIAGLSKQNYLRSLYRDKMSLNDDLDEITKAILNIDSPYNDPNLKQYLLQIASLKEDEINYSWKIDTKINRTLADQTIYSTRIVDDVHRVVKKYDNIYELNNERLEKVFSEKQRENLLVFKHDPQTYEILYKAYMQYAHEKYPFKAYYEEHGFLQKYAKNNNGPVIKQLKYLEDKLGSHLDITPQGAIDKKVVKLQVKSYRADIYYSKKENRYKFITIRHSDIVLRKGSYLIEEDWYNKEKKKKEINESYQFLFSLNRNNIIEITKLDKKDKIVEISRFIGVNNDIANKIEVKPLNYYEKKQLMPTIGRNTLKIRKFNVSLTGKIAEAVNEPLKLVF

SEQ ID NO: 9224 - protein, 1022 aa, synthetic construct
  REGION 1..1022: note = Synthetic
MRIFGFDLGIASIGWAVVDIEKENNNPEMGRAAVGKIQQSGVRIFSIAENPKDGSSLAAPRREKRAVRRALRRKALRIKEIRNLLEQSGLGNQNIIIKDDDVDVWALRGEDAFNRKLSERELSRVLVHMAKHRGYKSMRKFAEESDKETGKILESIARNQQRMAEYKTMAQMIYRTNCNATKKYRNGDNIYDNSIPRKEIERELNLIFDAQQKYGLFTPALLERYKQIAFRVRPVQSVGKMVGACTLEPNCMRAPKEAPTAELFVALTKINNMKIVIDGTVRSVNGTERMEILDLLRKTQSVKYKTLHNKIWKGQDIVFRGIKEESQDFYSMTGWHKLKKVLDNSDMGDMRMLDRIIKVIATQKDDAAIEKELRHKKIPEKYIPELKRLSASKFINLSLQALYKIVPGMLQGLTYDKACEAAGYDFKNKAFGDVKSKNGCLTEITELTRVPVVNRTVAQFRKVYNALVRKYGIPNQVNLEVGRDLKNNFDDRKKIEKKQEENRSKNEIARSEAVAVLGDNVRTKDVIKYKLYKDQNGQCMYSGDGIDLAHLDNYEIDHILPYSRSLDNSYMNKVLVKYSENQAKGDKTPYEYFGDTKRWDDFVGRVSATKSLGARKIYNLLNKNFNADEAEFRERNACDNAYAARYVRQVLNAAFPDLRVDVRSGALTHYLRGQWGLEKSRTDSDKHHAQDAIVIACATPGMVQYLSTISGLFENKRNEKGKPWWNNLKQNIQEPWSGFRSDVCQSIENVFVSRAVRGKATGSAHKETINSPKSGKGSMVLPRGRADKDNMFRMDVFKKDGKYVIVPIFVADTVDKKRQDVFYPQSANAEQPIVIDDSYEFVMTLHKDDYIQITTTDDKVYQGYIVQCNMPVGQFVIRSADNSAVFSVKTDTFEPDDFIVIENNLCKVIDCAAGKLRAMRSNGIIEEIDAAKKQTRNGETAKKQIQTTQRYEKRDAQKKLNIGTFKNLQKFQISVLGDMSEVNAEKRALVCAIKSQSEKRKGRKQPKRNKNGVANPSIDETV

SEQ ID NO: 9225 - protein, 1022 aa, synthetic construct
  REGION 1..1022: note = Synthetic
MRIFGFDLGIASIGWAVVDIEKENNNPEAGRAAVGKIQQSGVRIFSIAENPKDGSSLAAPRREKRAVRRALRRKALRIKEIRNLLEQSGLGNQNIIIKDNDVDVWALRGEDAFNRKLSERELSRVLVHMAKHRGYKSMRKSAEESDKETGKVLESIARNQQRMAEYKTMAQMIYRTNCNATKKYRNGDNIYDNSIPRKEIERELNLIFDAQQKYGLFTPALLERYKQIAFRVRPVQSVGKMVGNCTLEPNCMRAPKEAPTAELFVALTKINNMKIVIDGTVRSVNDTERMEILDLLRKTQSVKYKTLHNKIWKGQDIVFRGIKEESQDFYSMTGWHKLKKVLDDSDMGDMRMLDRIIKVIATQKDDVAIEKELRHKKIPEKYIPELKKLSASKFINLSLQALYKIVPGMLQGLTYDKACEAAGYDFKNKVFGDVKSKNGYLTEITELTRVPVVNRTVAQFRKVYNALVRKYGTPNQVNLEIGRDLKNNFDDRKKIEKKQEENRSKNEIARSEAVAVLGDNVRTKDVIKYKLYKDQNGQCMYSGDGIDLAHLDNYEIDHILPYSRSLDNSYMNKVLVKYSENQAKGNKTPYEYFGDTKRWDDFVGRVSATKSLGARKIYNLLNKNFNADEAEFRERNASDNAYAARYVRQVLNAAFPDLRVDVRSGALTHYLRGQWGLEKSRTDSDKHHAQDAIVIACATPGMVQYLSTISGLFENKRNEKGKPWWNNLKQNIQEPWSGFRSDVCQSIENVFVSRAVRGKATGSAHKETINSPKSGKGSMVLPRGRADKDNMFRMDVFKKDGKYVIVPIFVADTVDKKRQDVFYPQPANAEQPIVIDDSYEFVMTLHKDDYIQITTTDDKVYQGYIVQCNMPVGQFVIRSADNSAVFSVKTDTFEPDDFIVIENNLCKVIDCAAGKLRAMRSNGIVEEIDAAKKQTRNGETAKKQIQTTQRYEKRDAQKKLNIGTFKNLQKFQISVLGEMSEVNAEKRALVCAIKSQSEKRKGRKQPKRNKNGVANPSIDETV

SEQ ID NO: 9226 - protein, 1017 aa, synthetic construct; identical to SEQ ID NO: 4843
  REGION 1..1017: note = Synthetic

SEQ ID NO: 9227 - protein, 1022 aa, synthetic construct; identical to SEQ ID NO: 4844
  REGION 1..1022: note = Synthetic

SEQ ID NO: 9228 - protein, 851 aa, synthetic construct
  REGION 1..851: note = Synthetic
MIYKNNCDGAKKYRNGDGVYDNSIPREEIERELDLIFEAQHKYGMFTADLFEQYKKIAFRVRPIQSVSKMVGGCTLEPNCLRAPKEAPTAELFVALTKINNMKIVIDGETRSVNDEECAAILDLLRKTQTVKYKTLHNKIWKGQDVVFRGVKDETQDFYSMTGWHKLKKILDDPDMSDTRMLDRIMKVVATKKDDAAIEKELRRKKIPEKYIDKLKALSTSKFINLSLEALYKIVPEMIRGMTYDKACTAAGYDFKNKISGEVKIDNGCIREIAEWTRVPVVNRTVAQFRKVYNALIRKYGVPDQVNLEVGRELKNNFDDRKKIERQQNENRDKNDSARTEYETLTGRKATAKDALKYKLYRDQNGKCMYSGEAIDLEHLDNYEIDHILPYSRSLDNSYMNKVLVKYTENQAKGNKTPYEYFGNATRWDDFVGRVSATKTLGARKIYNLLNKDFEASEEDFRERNVSDNAYAARYVRQILNTAFPDLRVDVRAGALTHYLRGQWGLEKSRTESDRHHAQDAIVIACATPGMVRYLSTISGLFENKRNEKGKPWWDNLKQNIQEPWEGFRTDVLQSVEDVFVSRTIRGKATGSAHKDTINSPKSGKGSMILPRGRADKDNMFRMDIFKKDGKYVVVPIFVADTVDKNRQDIFYPQPPKAEQPVAIDDTYEFVMTLHKDDYIKITTVDDKVYEGYIIKCQLPAGQFFIRNSDNSAVFSVKTDTFEPDDLIVIGGNLCKVMDCESGKLRAMCPNGLIEEVEAIRKQTRSGIDSKKQIKTIGKYEKCDVQKTLSVGTFKKLQKFQISVLGDISEVKSERRALVCAIKSQSEKRKGRKQPKRNKNGVAHPSTNKTV

SEQ ID NO: 9229 - protein, 1073 aa, synthetic construct
  REGION 1..1073: note = Synthetic
NCDMSNIDYNIVGIDAGIASSGIAVLNMGAAPYIAGMYTTCWASHEKDKKSANAVRRDIRGQRRLTRRKTMRLQDTRAVLREALNVPEEVLEKAIKTIDPWHVRHAALDAPVSNLEFAKAIFHIIKHRGFHSNRKSERVVESKDTKSKKKAADDEKIGTLMGVASNTAMLNEDPKIRTIGELIAVDPKFAERKRNTKGDYTKSVGRLELKAEVETLFKAQRTFHGDDCEWLSPEVETRLIEILMHRRPTFSGSQIEDMVGHCPFEPNEIRAPKASYTFERFTWLQTLNNLKVISTDAPPRSLTPQEKSLLKEWPFGKEKLTFEQARKELGLTETQHFNLCDPTKEGATLFEASAYRKMLKALEARPECYRTHTEHLDQFALVLSLYKTDEDIRAALYERIPALQDDNDTVEAILELSFEKFGALSFTAMKKMLPFLKAGERYDEAKRKADYSDTPEFAPHDYLPPVTGEAITNPVVRRAINKVIKHLNAVLKRHGAVREIHLEVGSDISRNKKDRQAIMSAQRENKKAKKHAEKTCKKEGVANLDPENERDMFLLRLYNETNGHCLYSDTPLDIHRLGEIGYAEVDHILPHSRTFDNSQSNKILVLAKANQDKGNRTPFEYMGSDPDSERWLKFTSRVKAEKGLNPYKRRKLLNQHLPPLDGFIERNLNDTRYISRFLKSHIETHLLNDLDEPIKVICVSGQATAALRHAWGFKKVRHESDLHHAVDAAVVAACNRSTIQRLTLFNKRKELKGMRLENYMDPVTGEIIDQDGLTMLDKNFPGPYDEFRAEVMAHIAPNRREALAQLSGYKRYPERLESVKQLYVVRAKEEKFTGEVFKGTVYSVDERDPDKPVLYRKVRLTDLKKTDLDSIKDADNPREAPTVEAIKQRMAAQDFKAEKAFEEPFYKHNAEGKPTTTPVKSVKVAIVDKPAKRLPGKGMGAVLNAKGSTVRTDIYQIDGTYRAAPIYRHQLAGEMRSHYIRNPTKADPRSEVELPPDATPLFSLTPNCFVRAHHKNGMTYEGYYRNFDRNKRAILLLAHDQGSADKKQVVSLGTLVSLDVLHVGPLGDLYTAS

SEQ ID NO: 9230 - protein, 1044 aa, synthetic construct
  REGION 1..1044: note = Synthetic
MVNRKFNNYNMIDCLQQEVERLGASYPIMNEVTLGIDVGTSSCGIALIWGDRIAFLGVRCFRSATDAYTGLAKSSIRRQKRGRRLRLKRHRQRRQQLRGLLEAAGLLPAAGKLPPLDPYQIRAEGLERRLIPFEFGVALAHMAKRRGYVPRRELKHAAEASRLAIGPIAAQAARNEMHAESYRTAGEMLARDPAFAQRKRNRAGNYRAALSRRMIENETATFFEAQRQFGNPAATEDFQQAFRDIAFQQTRAEPRARCVGPCPYLPSDQRGARHAPTIERFRFLDALTKLKIADGGTIRRLQPVEVARAAERFGRTLRITRLDLRRWLALDERIRFIDGRPEEADIVSSMGAAFGTVTLRGVLGRGWWRDLGERPGLLDRIAEQVAFQRSYPDLAAALEELGLAAPVIEAILEAFSDGEFEHFRGTGALSCEAAGRMLPFLERGKDMQEAAAKAGLDPRAPQQQILHRLQRPSVRRAVMETMKQVRAILREWQIRPGRIHVEVSRELALGPSQRSALQEYRRKRRTARAAARTALAELADGKPHGRVSNAMVERYLLWQEQSGRCIYSGEEIPVAELFDGSRVQVDHILPLSRSGDHSRTNTVICRAYANQRKGNRTPFEWLGHDQKSWHEFRRRVRWLPISPRKQKFLLARQFASREAATLNRNLHDTGQAAQCVLAALGVMYPEAERVRRVVSRPSQLTAVLRRAWGFSKDREDLRHHALDALITALASDRIFVQLTEARRNMGSAVDVAFHPPWKNFGLDVMTALSNVAVSRSEQHRGRGSAHGHTVRRQRIQPDGSRVLYERRPLARLRKTDLARIPDPNVNWRLIRALEGWFARGAPLDEPPTSPQGDPIRRVRLKLTGAAGVPRDGLPIRGGIAAYGDLVRIDLFERRGRYVMVPVYAVHVATERDPPALAVVRDKPRDAWRPIGPEDHFLFSIYRDALIRVKRRNGEVIEGFFRGADIASLRLALADPLMPRTIRRVPISLALNIEKFVVDRLGRRFPVRKEMRTWRGLNKPWPPKSMAVQIDLPAKKETSVPEVQA

SEQ ID NO: 9231 - protein, 947 aa, synthetic construct
  REGION 1..947: note = Synthetic
MVNRKFNNYNMIDCLQQEVERLGASYPIMNEVTLGIDVGTSSCGIALIWGDRIAFLGVRCFRSATDAYTGLAKSSIRRQKRGRRLRLKRHRQRRQQLRGLLEAAGLLPAAGKLPPLDPYQIRAEGLERRLIPFEFGVALAHMAKRRGYVPRRELKHAAEASRLAIGPIAAQAARNEMHAESYRTAGEMLARDPAFAQRKRNRAGNYRAALSRRMIENETATFFEAQRQFGNPAATEDFQQAFRDIAFQQTRAEPRARCVGPCPYLPSDQRGARHAPTIERFRFLDALTKLKIADGGTIRRLQPVEVARAAERFGRTLRITRLDLRRWLALDERIRFIDGRPEEADIVSSMGAAFGTVTLRGVLGRGWWRDLGERPGLLDRIAEQVAFQRSYPDLAAALEELGLAAPVIEAILEAFSDGEFEHFRGTAALSCEAAGRMLPFLERGKDMQEAAAKAGLDPRAPQQQILHRLQRPSVRRAVMETMKQVRAILREWQIRPGRIHVEVSRELALGPSQRSALQEYRRKRRTARAAARTALAELADGKPHGRVSNAMVERYLLWQEQSGRCIYSGEEIPVAELFDGSRVQVDHILPLSRSGDHSRTNTVICRAYANQRKGNRTPFEWLGHDQKSWHEFRRRVRWLPISPRKQKFLLARQFASREAATLNRNLHDTGQAAQCVLAALGVMYPEAERVRRVVSRPSQLTAVLRRAWGFSKDREDLRHHALDALITALASDRIFVQLTKARRNMGSAVDVAFHPPWKNFGLDVMTALSNVAVSRSEQHRGRGSAHGHTVRRQRIQPDGSRVLYERRPLARLRKTDLARIPDPNVNWRLIRALEGWFARGAPLDEPPTSPQGDPIRRVRLKLTGAAGVPRDGLPIRGGIAAYGDLVRIDLFERRGRYVMVPVYAVHVATERDPPALAVVRDKPRDAWRPIGPEDHFLFSIYRDALIR

SEQ ID NO: 9232 - protein, 1110 aa, synthetic construct
  REGION 1..1110: note = Synthetic
LYFGFVTEWNKPVENSAAGSVLRDRLDDERAGDTLSPQRRPEGGIPPRSDAEAEGLPFEGNLLDEASSRHFHDFKLNKTPEYVNSKSYPGPVEAMVQRLAAAVADLPIRKRSVLGLDIGAGSCGYALLEDGRVALCGVRLFEAAGRNPKGESKQKVRRDARATRVRLRRHRKRRQALRRLMAAVGLPDPVAHAGEADPYTCRAEGLDRRLDPVEWSAALYHIAKRRGFPSLGGGADEDPDDATFAAELQANSARAADYRSVGEYLAKDPRYARSKRNRAGSYHTVFSTSLLQAEVECLFAAQRRHGNPAVAECFEAEFLALAFAVRGPEDGEGRVGPCPFLPARRRGARHAPSLERYLFLDTLTKLRIDDGTEIRRLTPAELARSAERFGRAPRVTFANLRAWCGWPAAVCAVSGANDHADLVTPAGAAAGTFALWSVLGEQGFAAMATVPGLSDAVAAVLTFRNTEARWREGLQDLNLDPGMIERLVAARYDGVLAIMRGAGGLSAAAAARMVPHLARGDLFHDAALAAGLDPLARERAILRTIQNPGVQRAVLETLRQVQALLREVGYRPARLHVEVAEDVAMGRAGRVQMAAGRTATRRLRESARVALAGLIPVSTITDALVERYLLWQEQGGTCLYSGQPMTMRQLLDRSAVQVDHILPRARSGDNSRHNRVVCFADRNQDKGERTPWEWFGGNTALWEAFEARVRASRLSARKQGNLLQRYFAEREARVLRRNLNDTRYAARCVLKALQALYPGGQHQRHLFARPGRATAALRGAWGLTKDRDDPRHHALDALVVAAAGPKAMAALTAANGRLADREETAAALPWPDFATDALAALANVMPSRSELRRGRGQGHGMTVRRVRAGANGEQRVFERRPVWKLRPGDLDRIPDPQMNQGLIAALRAWIADGRPADRPPIAPSGAPIRRVRLLVIGSNGIPREGLAVSGGVAAFGEIARIDIYHGPNGYLPVPVNRSELALRADPPRRAIVPAALRRDWVSIAADNVFRFSLYRGSYVEIVNRSGVTKAGFIRSFDTYQCQLYLTRPQSASEIMKVGIKTAVVLRKFAVDRLGRLSRVRGEALTWHGATIAPRQMPEPAQEKTSLREVA

SEQ ID NO: 9233 - protein, 1059 aa, synthetic construct
  REGION 1..1059: note = Synthetic
VHRPQRGIPRHPVGEAAGLPCEGDLLDEASPHPIHDYRLHDRLPDVQRKTDPGPIEALLAKIAPELAALPIRKGTVLGLDVGTGSCGYALLDGKAIVRTGVRLFETAGLNHKNGSKQQQRRAARAVRVRLRRHRQRRAAVRGLLLSLGLPDPVAQAGGADPYQSRAAGLDRCLDPLEWSTALYHIAKYRGLATDRMDVRAAAGFEDADADLCAYRTVGEMLALDPRYAESKRNRAGSYREAFTSAALREEAATLFACQRRLGNAAAGEAFEEAFLALAFAIRGTRDGEGQVGTCPFCPDRRRGARHAPTMERYLFLNALTKLRFLENGAIRRLNADELAEADAMFGRSPTVAFGDLRQWFGWGDTVRPVGGFRDGDDLVTGVGAAAGTHALQAALGPGRYAAMMAVPGLADAVAAVLTFRNSRERWQAGLLALGLGDSLSELLIQAREDGPLAVLRGAGPVSVAAAAAMVPHLARGDLFHDAAIAAGLDPLAKERSLLRTAQNPCVLRAVTQTLRQVQAVLRAEGYRPARLHVELADDLAVSPARRAAIAARKSAEHAMRGSARVALAGLVPAARINNAMIDRYLLWQEQEGRCIYSGKAIPIRALLEATAVQVDHILPRGRSGDNTIGNRVVCFAECNQDKNERTPYEWKGSARAWWGAFAKRVADSRLSDRKKRNLLRTHFAESEARLLRRNLDDTRYAARILLSALRALYPKGQPQRHLFARPGHVTAVLRQAWGLQKDRTDPRHHALDAIVVASADNRRMAALAVGDGPPEAPWPEFAADVASALASVMPSRAEVRRGRGQAHGMTLRRARTDPEGQPVVYERRPIWRLRLKDLERIPDPDVNAGLIASLRAWIEAGSPADRPPLAPSGTPVRRVRLLATGGCGIGREGVAVNGGVAAFGDVVRLDIYCRDGRYVAVPVNRTDLVSLESPPRCAMVPGALRADWLRLSDDHAFVFSIYRGSYIELENSRGGVNCGYVRSFEIFRGQIHLRRQDNWGSVLKVSVGTARSIRKFSVDRLGCLHEVRGEALTWRGRTLANRQQSGAQGEGATSLREVA

SEQ ID NO: 9234 - protein, 591 aa, synthetic construct
  REGION 1..591: note = Synthetic
NEKGDGGDPRGAGQISLLRRNDRSDPKFADRKRNRDKDYSHTPKRSDLEAELHSIFAAQRRFGNTRATQELETEIAAVAFMQRPLRDSEDKVGPCPFEPGEKRTAKHAPSFEMFRFLSRLTNLRLSTGRTEEGLSPEQVGLAARGFGQRKSITFKTLRKLLDLDPNTRFAGVARDKESWDVAARAGAAAAGAHALREALGDAPWNALAKTPEKLDRIAEVLTFREDIDRIRQGLEEIGIEPLVVERLVEATREGAFNGFRGAAHISAKAARNIIPGLREGLVYSDACARVGYDHAARPAVSLDQINSPVTRRAFGEAIKQIRAVARELAPIEFVHIELARDVGKSAEERRKLTDGIENRNAEKERRRGVAAGILGRPVGDDELLRYELATEQLFKCAYCFGAIAPDGFRANDTSYQVDHILPWSRFGDDSYLNKTLCCTRCNQEKRGRTPFEWFDADKTAAQWETFIGGVESLKEMKGLKKRNFRLKDAASVEDRFKDRNLMDTRWASRLLAAELKRMFPAYEGKRRIFARPGAITSKLRRAWGLERLKKVDGERVSDDRHHAVDAIVLAVTTESLLKGMTEAARERRTRR

SEQ ID NO: 9235 - protein, 688 aa, synthetic construct
  REGION 1..688: note = Synthetic
CFGNAHATEELERQFRDKAFSQRPLQDSEDKVGNCPFELDHHKRTAKRAPSFELFRFLQRLVNLRVAVGQAERSLRPEEIGLVLKKFGEQKSYTYKALRKDLDLDPKAGFSAIARNSEWLDIAARKGQSAFGTCVLREVLGAGPWHSLLKTPEKLDRIAEILTFREDLTSIRKGLVEIGLGGPVIDRLTQAASEGAFTEFKGAAHISSLAARNIVIGMREGLVYSEACARAGYDHSARRAVSLDQIGNRITALSEAIKQVRAVAREYGPFDAVHIELARDVGKSAKERAEITRGIEERNAEKDRLKTEAADLLKRAISDDELLRYQLAKEQDFKCVYCDSQLAPTGFAANNTGWQTDHILPWSRFGDDSYLNKTLCCTRCNQHKKGRTPFEWFCEMTETEWDTFLARLENLKEMKGLKKRNFKLRDAAAVEDKFKKRNLTDTRWVTRLLANELKRMFPAPDGKRRIYTRPGAITSKLRRAWGLERAKKENGERVDDDRHHAVDALVLAATTESLLLRVTKDIQQRKDQGRSDDILHEQQPWQDFRRDVTQVVYGENGIGGVFVSRAERRRARGEAHDATVKQIRQVNGEKMVFERRPIEKLTEKDLKRIPMPEPYGKMANPRELRDQMVEALHVWIVTGKPKAADKLPRSSKGDIIRKVRVASKDKVAIELHGGTVNRGDMARVDVFR

SEQ ID NO: 9236 - protein, 846 aa, synthetic construct
  REGION 1..846: note = Synthetic
DNDYSHTAKRSDLEDEVRKIFQAQRCFGNARATEELERQFRDKAFSQRPLQNSEDKVGNCPFEPDHKRTTKRALSFELFRFLQRLVNLRVAVGRAERSLRSEEIGLVLKKFGEQKSYTYKALCKDLDLDPNAGFSAIARNSEWLDIAARKGQSAFGTCVLREVLGAGPWHSLLKTPEKLDRIAEILTFREDLTSIRKGLAEIGLDGPVIDRLMQAASEGAFTEFKGAAHISSLAARNIIIGMREGLVYSEACARAGYDHSARRAVSLDQIGNRITALSEAIKQVRAVAREYGPFDAIHIELARDVGKSAKERAEITRGIEERNAEKDRLKTEAADLLKRAISDDELLRYQLAKEQDFKCVYCDSQLAPTGFAANNTGWQTDHILPWSRFGDDSYLNKTLCCTRCNQQKKGRTPFEWFCEMTETEWDTFLARLENLKEMKGLKKRNFKLRDAAAVEDKFKKRNLTDTRWVTRLLANELKRMFPASDGKRRIYTRPGAITSKLRRAWGLERAKKENGERVDDDRHHAVDALVLAATTESLLLRVTKDIQRRVDQGRSDDILHVQQPWQDFRRDVTQVVYGENGIGGVFVSRAERRRARGEAHDATVKQIRQVNGEKMVFERRPIEKLTEKDLKRIPMPEPYGKMANPRELRDQMVEALHVWIGTGKPKAADKLPRSSKGDIIRKVRVASKDKVAIELHGGTVNRGDMARVDVFRKGGKKGKWEYYVVPIYPHQIATMDTPPNRAVKGGGSNETEWYVLDGSAKYLWSLYSNSFVEIAKSDGDVIEGYFRSLDRNTGAITISPHMNAAEIRKGIGVKTLSSFNKFTVDRLGRKFKVHRELRTWRGKACA

SEQ ID NO: 9237 - protein, 824 aa, synthetic construct
  REGION 1..824: note = Synthetic
MNAIRDLLHRNGMLPDAKDDALALALRRVSRPGHKLQVTPWALRAVAHDRVLTDDEFSVVLGHIARHRGFRSNSKREATSNAAGAPSKTKKAMEETREGLAKYRSFGEMLASDPKFSDRKRNRDNDYSHTAKRSDLEDEARKIFQAQRCFGNAHATEELERQFRDKAFSQRPLQDNEDKVGNCPFQPDRKRTAKRAPSFELFRFLQRLVNLRIAVGRAERSLRPEEIGLVLKKFGEQKSYTYKALRKDLDLDPKAGFSAIARNSEWLDIAARKGQSAFGTCVLREVLGAGPWHSLLKTPEKLDRIAEILTFREDLTSIREGLVEIGLGGPVIDRLMRAASEGTFTEFKGAAHISSLVARNIIIGVREGLVYSEARARAGYDHSARRAVSLDQIGNRITALSEAIKQVRAVAREYGPFDAIHIELARDVGKSVEERAEITRGIEERNVEKNRLKTEAADLLKRAISDDELLRYQLAKEQDFKCVYCDSQLAPTGFAANNTGWQTDHILPWSRFGDDSYLNKTLCCTRCNQQKKGRTPFEWFCEMTETEWDTFLARLENLKEMKGLKKRNFKLRDAAAVEDKFKKRNLTDTRWVTRLLANELKRMFPAPDGKRRIYTRPGAITSKLRRAWGLERAKKENGERVDDDRHHAVDALVLAATTESLLLRVTKDIQRRVDQGRSDDILHVQQPWQDFRRDVTQVVYGENGIGGVFVSRAERRRARGEAHDATVKQIRQVNGEKMVFERRPIEKLTEKDLKRIPMPEPYGKMANPRELRDQMVEALHVWIGAGKPKAADKLPRSSKGDIIRKVRVASKDKVAIELHGGTVN

SEQ ID NO: 9238 - protein, 669 aa, synthetic construct
  REGION 1..669: note = Synthetic
ETRDGLAKYRSFGEMLASDPKFSDRKRNRDKDYSHTAKRSDLEDEVRKIFQAQRCFGNAHATEELERQFRDKAFSQRPLQDSEDKVGNCPFEPDHHKRTAKRAPSFELFRFLQRLVNLRVAVGRAERSLRPEEIGLLLKKFGEQKSYTYNALCKDLDLDPNAGFSTIARNSEWLDIAARKGQSAFGTCVLREVLGAGPWHSLLKTPEKLDRIAEILTFREDLTSIRKGLAEIGLDGPVIDRLIQAASEGAFTEFKGAAHISSLAARNIIIGMREGLVYAEACARAGYDHSARRAVSLDQIGNRITALSEAIKQVRAVAREYGPFDAIHIELAREVGKSAKERAEITRGIEERNVEKDRLKTEAADLLKRAISDDELLRYQLAKEQDFKCVYCDSQLAPIGFAANNTGWQTDHILPWSRFGDDSYLNKTLCCTRCNQHKKGRTPFEWFCETTETEWDSFLARLENLKEMKGLKKRNFKLRDAAGVEDKFKKRNLTDTRWVTRLLANELKRMFPAPDGKRRIYTRPGAITSKLRRAWGLEGAKKENGERVDDDRHHAVDALVLAATTESLLLRVTKDIQRREDQGRSDDILHVQQPWQDFRRDVTQVVYGENGIGGVFVSRAERRRARGEAHDATIKQIRQVNGEKIVFERRPIEKLTEKDLERIPMPEPY

SEQ ID NO: 9239 - protein, 818 aa, synthetic construct
  REGION 1..818: note = Synthetic
MGDCQRVLGIDLGIASCGWGVIEVRDKAGSIFAKDGKPAVGVRCFDAPLVYKTGKPKDAQRRSARGQRRVIRRRRQRMNAIRDLLHRNGILSDAKDEALALALRRISRPGHKPQVTPWALRAVAHDCLLTDDEFAVVLGHIARHRGFRSNSKRKATSNAAEETSKMKKAMEETREGLAKYRSFGEMLASDPKFSDRKRNRDKDYSHTAKRSDLEDEVRKIFQAQRCFGNAHATEELERQFRDKAFSQRPLQDSEDKVGNCPFEPDHHKRTAKRAPSFELFRFLQRLVNLRVAVGRAERSLRPEEIGLLLKKFGEQKSYTYNALCKDLDLDPNAGFSTIARNSEWLDIAARKGQSAFGTCVLREVLGAGPWHSLLKTPEKLDRIAEILTFREDLTSIRKGLAEIGLDGPVIDRLIQAASEGAFTEFKGAAHISSLAARNIIIGMREGLVYAEACARAGYDHSARRAVSLDQIGNRITALSEAIKQVRAVAREYGPFDAIHIELAREVGKSAKERAEITRGIEERNVEKDRLKTEAADLLKRAISDDELLRYQLAKEQDFKCVYCDSQLAPTGFAANNTGWQTDHILPWSRFGDDSYLNKTLCCTRCNQHKKGRTPFEWFCETTETEWDSFLARLENLKEMKGLKKRNFKLRDAAGVEDKFKKRNLTDTRWVTRLLANELKRMFPAPDGKRRIYTRPGVITSKLRRAWGLEGAKKENGERVDDDRHHAVDALVLAATTESLLLRVTKDIQRRVDQGRSDDILHVQQPWQDFRRDVTQVVYGENGIGGVFVSRAERRRARGEAHDATVKQIRQVNGEKMVF

SEQ ID NO: 9240 - protein, 818 aa, synthetic construct
  REGION 1..818: note = Synthetic
MGDCQRVLGIDLGIASCGWGVIEVRDKAGSIFAKDGKPAVGVRCFDAPLVYKTGKPKDAQRRSARGQRRVIRRRRQRMNAIRDLLHRNGILSDAKDEALALALRRISRPGHKPQVTPWALRAVAHDCLLTDDEFAVVLGHIARHRGFRSNSKRKATSNAAEETSKMKKAMEETREGLAKYRSFGEMLASDPKFSDRKRNRDKDYSHTAKRSDLEDEVRKIFQAQRCFGNAHATEELERQFRDKAFSQRPLQDSEDKVGNCPFEPDHHKRTAKRAPSFELFRFLQRLVNLRVAVGRAERSLRPEEIGLLLKKFGEQKSYTYNALCKDLDLDPNAGFSTIARNSEWLDIAARKGQSAFGTCVLREVLGAGPWHSLLKTPEKLDRIAEILTFREDLTSIRKGLAEIGLDGPVIDRLIQAASEGAFTEFKGAAHISSLAARNIIIGMREGLVYAEACARAGYDHSARRAVSLDQIGNRITALSEAIKQVRAVAREYGPFDAIHIELAREVGKSAKERAEITRGIEERNVEKDRLKTEAADLLKRAISDDELLRYQLAKEQDFKCVYCDSQLAPIGFAANNTGWQTDHILPWSRFGDDSYLNKTLCCTRCNQHKKGRTPFEWFCETTETEWDSFLARLENLKEMKGLKKRNFKLRDAAGVEDKFKKRNLTDTRWVTRLLANELKRMFPAPDGKRRIYTRPGVITSKLRRAWGLEGAKKENGERVDDDRHHAVDALVLAATTESLLLRVTKDIQQRKDQGRSDDILHVQQPWQDFRRDVTQVVYGENGIGGVFVSRAERRRARGEAHDATIKQIRQVNGEKIVF

SEQ ID NO: 9241 - protein, 894 aa, synthetic construct
  REGION 1..894: note = Synthetic
MDQEKKIIKKLGLDLGTNSIGWCILDFNEKENRYNLVDLGVRLWKKSGEKAERRQHRMARRQRKHLKSRLRKLEKFLNDAKLSIIEKKQRGLCSLFKLRVKALDQPLSPEELREILFHIAKNRGFKGSELEIEKQEKEQKGFKKILTETEENVKKTARSYSEWLIKTNQPKLRLRGDADKKPQHYPTRKLIKEEFNAIRSTQEPITSFLDWDKLEDILFFQRGLSIPYIGKCSIYSNEERLAKDDPLAIEYVMLENLSHITLSSKSIPEFRGLTKEEIHEAKESLKDQKEMTVNSLLKHLQLQKDYTIKRKDEIKEKAKITGLKARPSGYLNLSKKAIKEILERFETSNHRIGEIIADLRKETIKETPISDHLKYYGEVMSDVPNFYIIPPCRCANSNECLHKVGKDERKWGITPNGIHHAAFNQIRQLINAIIKKHGKIDEIIIELIRSDWEPEKADQIRKKNEKLNEEIKKRLEAGGKPVTKETMTKGQLFMELEKESINTCCPYCDQRFGWESVFSSDIQIEHVIPYSKTKSNNFSYLLLAHRSCNDKKGNKTPYEAFGQQEIYDQMIQRTPESKRWMFASNALEKFTELTDGWLPNSLVNTSTIAKHARKYLSSITNKVYATRGSLTADLRRHFKLKKNRQENHEHHAIDAFCVALISPKILQKISRYSWAESKFEDVLFNNEQELIHQLKEKKIVISRKINHALQGAIVEQTAYGIYPNTPNEYYRAKAPTAKKSGKAYESVDINSAQMVEIDGKGYKSAQYAYADLWQNIENPTEIIWEFKTLRDALDIQSGKKTYCQPSNQKGKWRKLLRLRKGDYLENSKKELFFVAQFNPSSNRILIADPKEINSQRKEAKKRWCVGKSFFKDKWHLAHVDILGNIKVTPPRWCV

SEQ ID NO: 9242 - protein, 753 aa, synthetic construct
  REGION 1..753: note = Synthetic
MSKRFSFDLGVTSVGWAVFETSHDATYKLIDAGSRVFSEPRNPQSKQSLAVARREARARRRQIRRSSTRRRLMINLFKSFEWLPKDMNPPYGFSGNPYQVRSKALDQILSPHELSEAFFHLAKRRGFKSNRKGNPDTAELNEITQAAEELKLEMSKHGHRTLGEHLAFLYNQDPLKRLRGRRTTRQMYLDEFQIIVDSQMRLGSPFLTRENVEKLSRVIFYQLPFELQKERRIKTLGPCLCEPNEPRAYRYEPLAIEFRIIKTVNQIKVIDPHTSDEIPLTHEQRESVIFALLEFKKVTFDKIKKLIDVPNTYELNLESSRRDDIKGDPYYSSIKRALKKRYSRGLKREIQTLCEILHSSESIEEALSLISARNLSIHLTPDEVSKIYKGFPDPEEGTSAYSLKALEKLLPHLLEGKSEYSAVNALYPSQDLDTSEFIPLPKVKITNPSVNRTVHQFRRVYNALVKLYGKPESVAIELAKDIKKSKKSKLNESIRQKAREQQRDKYKEQIIEAGMAPSSSLILKLELAHQQGNLCPYTGKSFGYAEIFSDGILEIDHILPYSRSVDDSMMNLVLVYRDANKEKGNRTPGEWQQGSEYDAMIARVLKMKFSYLKKKRFYRGVKAEVDGFISQQLNDTRYASKYVRELVEQTFPSSERKKKISTLKGAHTSILRRQWNLSKDRNDLRHHAVDAVLVGLVTPKILKSLSTLRGSYEDHFHVPLPYPELHRDLNLILERMIVSRRQSRKQSGAFHTE

SEQ ID NO: 9243 - protein, 663 aa, synthetic construct
  REGION 1..663: note = Synthetic
MGKRFSFDLGSASVGWAVFEAEGHAVIQLLDAGVRVFDEPRNSKTLESNAAERRRARSLRRQIRRRKTRRTLLIRLFKEYGWLEQSINPPYGFSENPYRLRKEALERLLSPLELAEVFFNIAKRRGFRSNKKTDAFNTELIKMSASANLLVQSMNELGHRTLGEHLNHLYLNTLNGEVQDRKRIRGLSTLRKMYEDEFHLIVETQKKLGTQLLNESQIEDLKKIIFFQLPFELQIERRLKTIGKCPLEKGEVRAYRHDPIGIEFRIRAIVNNMEIIDPTNNNSQNLAPNQREELAQALLENAKITFPKIKKLIKVSDQYQLNYEAERQKDINGDPFYSTVINILGIKNSSQHKEDIQRICKNYHASNSIEDFEFRFQSLNLPFSASREKFQEIYEKMPSGEGGTFAYSSLAMSKLLPLLREGKSEHEAKQTVYPADIDSKVYDLLPLPLDKITNPTVNRTVHQFRRVYNALIKVYGKPETIVIELAKEIKLPKWKKDEISFQQRKIEKNREAIKEKIKEDGFDPTYNLVLKFELAESQGFQCPYSGKSFGRAEIYAENVLQVDHILPFSRSLDDSRMNKVLTFAEENKDKSDRTPGEWKTDELYSQMIERVCKMTFPWAKKWRFYNNAKADVESFISQQLNDTRYASKYVREFVGLTFPVSER

SEQ ID NO: 9244 - protein, 997 aa, synthetic construct; identical to SEQ ID NO: 7701
  REGION 1..997: note = Synthetic

SEQ ID NO: 9245 - protein, 997 aa, synthetic construct
  REGION 1..997: note = Synthetic
MERVLGLDLGTSSCGWALVDVPTTDGESGKVIALGTRVFPAGAEISGSISTTPGKERREKRTMRRQIARRAHRKVLLRGELTRLGLLPGDLVEYEQLMDKNPGELLKRAENDEQLSLRDIGRIIYWMSCRRGFLSLRKGGSSLIDEDDESDWQPSRFRLSQYNPTTGERVVTGQEEVLVNVLESQRRFYPEILTSQIIFGRRGRMTYPARPIRRDAFLGDGDGNYVDEFGIHGLVFFQRSVYWDKGTIGYCSLDPKSRKQRASRADRVSQEFIIRQLLINLKVGSDKRQLTDVERQRLFEVLMQQKTLAFSKVRSILSLSDDDKINFERQDDKGLSGNQVDPPLSKAVGATWATWSEMTKNNFVNLLIGSATEESIRTQLTKQFSLNDDQISAVLKVPLPSGRMSYSRKTILRLLPFMSSALTVKDVIQQAGFSSREDTPATSTVDLDSITNPLVKSSMRQLAKVLGDIDSRFKRNDGTTFDKVRIELARDVANSAKKRGEITKSQRRNKGDRDKAKVKIAEFAPGAEESSDSIRRQRLYDEQRNICVYCNKPISQVDVFSNKVQIDHILPRSQTLDNSMGNVVLVHSAENQEKGERTVFEWLGQEGVDQVVETAKRLDLREGKINKLRLEHVEPDHIPRSLLTTTGYITTLARDYLRDITGLSEKFIEVSRGRLTASLLYLTGLSKKDLVDDHRRHAQDAVMVALTSPKMAQNLAKRYKRERDFNKPRDDEYGTSEPWRGLRDDIKKHLSVMVTSHKPNRKNSGQFVEETNYGRVNSPYLKGNTVYARRRPLVSGFTQAQFAQIADPAIKQILIEDLKRRNIDVTTASKITFEPKDPPTFDGNAIKSVRCHANYPSHIILKPDTEPKTGVASGGNHIAYVYKNQSTNDYRMKVINRLDSYRVRNKPEKERQKDFIESGEVFVMSLCVTDTLEVLKDRVQSLYKVTSIGALPPVIYLAPINDSSGDNRWKVSINPLMSFSCKKIVVTPSGLVRRSNQ

SEQ ID NO: 9246 - protein, 727 aa, synthetic construct
  REGION 1..727: note = Synthetic
WAVLDVPTEDGEVGEVLAMGSRIFKAGAEVKGNTVTTKARERREKRMMRRQIERRASRRRLLRSELIKVGMLPKDDDAFDLLMDQDPAPLLATGMAKKKLELHEIGRVIYWMSSKRGFLSLRSGGATLVDDDPDFVPTRYRVSQFSRSTGERIHIGQEDILIEFLDGQRELHPKVLTDKATFGARGRLVYPVKPIARDKYASNGSALDEFGIHGLVFFQRKVYWDQATIGACSLDPSSGKRAARAERCAQEFSIWNTIVNLRIGSAQRPLDQAERSTLYKLMSAQQTLAFSKVRKALSLDEEDRINFEREDSKGLVGNQTDALLASRLKDAWTDLSEDDKDDLVYLLLGNAPEDQIINQLTKQYGFDEKTIESALKAPLVTGRTNYSRATMRKLLEHLPTEPDVRSAILAAGYPTPEEARAKQPLNLDTMSNPLVRTSLTQLGKVIGALEKRFDRPGDKAFDVVRIELSRDVSMNAKQRERVTKQNRDNEKSRDRAKGLISEFAAGGENSGDNIRAARLWSDQQERCLYCGQNISAVELFSNKVQVDHILPRAQTLDNSMGNVAVVHTKENLDKGERTIYEWVGAERMEEIADRARTWGLPYGKQLKILTEHVDPDTIPASLLTQTGYINSLARDYVALRPNLTERVEVSRGRLTAALLYRLGLKKDRDDHRRHAQDAAMIAITTPRIAQQLSLRFKAERDFNQMRDEGWGSWEPWVGLRQQITDVY

SEQ ID NO: 9247 - protein, 742 aa, synthetic construct
  REGION 1..742: note = Synthetic
MQRTLGLDMGTNSIGWAVLDVPTEDGEVGEVLAMGSRIFKAGAEVKGNTVTTKARERREKRMMRRQIERRASRRRLLRSELIKVGMLPKDDDAFDLLMDQDPAPLLATGMAKKKLELHEIGRVIYWMSSKRGFLSLRSGGATLVDDDPDFVPTRYRVSQFSRSTGERIHIGQEDILIEFLDGQRELHPKVLTDKATFGARGRLVYPVKPIARDKYASNGSALDEFGIHGLVFFQRKVYWDQATIGACSLDPSSGKRAARAERCAQEFSIWNTIVNLRIGSAQRPLDQAERSTLYKLMSAQQTLAFSKVRKALSLDEADRINFEREDSKGLVGNQTDALLASRLKDAWTDLSEDDKDDLVYLLLGNAPEDQIINQLTKQYGFDEKTIESALKAPLVTGRTNYSRATMRKLLEHLPTEPDVRSAILAAGYPTPEEARAKQPLNLDTMSNPLVRTSLTQLGKVIGALEKRFDRPGDKAFDVVRIELSRDVSMNAKQRERVTKQNRDNEKSRDRAKGLISEFAAGGENSGDNIRAARLWSDQQERCLYCGQNISAVELFSNKVQVDHILPRAQTLDNSMGNVAVVHTKENLDKGERTIYEWVGAERMEEIADRARTWGLPYGKQLKILTEHVDPDTIPASLLTQTGYINSLARDYVALRPNLTERVEVSRGRLTAALLYRLGLKKDRDDHRRHAQDAAMIAITTPRIAQQLSLRFKAERDFNQMRDEGWGSWEPWVGLRQQITDVY

SEQ ID NO: 9248 - protein, 636 aa, synthetic construct
  REGION 1..636: note = Synthetic
MKRVLGLDLGTNSIGWAVLDVPDTDGEIGQVVALGSRIFAEGAERDGSALVTKAKQRRLKRGMRRQVLRKSQRQRHLRTELVRAGLLPESDGEFADLMTLDPAVLVGRSDNGESLSLREIGRVVYWFGARRGFLSLRSGGGDFVDAGEHDEAPKRYRRQMVDPASGEIVDRGQEGRLVEFLSQQQTHHPQILSYTAIFGQRGKLTYPVKPIARAAFRNVDGSLFDEFGLHGLVFFQRKVTWSQGSIGACSLDPRSGARAAVADRLAQRFRVWKTVIDLRVDNPERPLTAEERLALFELLMSQKSATFSSVRKKLSLGADVPINFERPEKKDLTGNGTDTELRRLLGVTWDTMTEESKDELVHLLLGNASDDQVRAVLSGHFGLDADQTNAVTKAKFPAGRAAYSRATLRRLLAVIDGCETEREAISNAGYPTPESVRQERGVEISGLTNPLVKTTLMQLRRTLAAVARTYGNTSGDPFDVVRIELTRDVRQNQKQRERTSTEQRDRERSRKRAKQLISEYAPGAENSRDALRSVLLWETQQQQCLYCGKAISKTALFSPGFEMDHILPRSRTLDDGLSNMALVCAAENQNKGNRTITEWKGADYASEVAERAKMLKLPRGLVSRVTQAHVSDDAIP

SEQ ID NO: 9249 - protein, 862 aa, synthetic construct
  REGION 1..862: note = Synthetic
MKRVLGLDLGTNSIGWAVLDVPEHENPEENTGTVVAMGSRIFTQGAEEAGSALETPAKVRRAKRSMRRQIQRRAKRRQRIRHELTAIGLLPDGDLEFDDLMKEDPAALMQSSTEGAVLSLREIGRVIYWFSSQRGFLSLRAGGGDTTDEDDDRATRNRYRNPQTVKETGEIKVRGQENILVDFLYQQAQHHPALLTDEIIFGARGRLTYPVRPIKQGNFLSDGDSWLGEFGIHGLVFFQRSVYWDQKTIGTCSLDPRKGGPRVLRADRNAQKYRVWKNVLDLRVETPQRSLSDGERKVVYDTLMTQGSVSFNSLRKKLKLPDDAAINLALSEREELKGNETDAAMRKALGDAWEEMDEQTRDNIVSVLLGNALADQVRAVLMGKQFGLTHEQAEAALLVGFPSGRSMFGRHTIKQLLRFMPEGPMASSEALQETLGGVWEALSDTQQDQMISLLLDDAKRSKEKKALSATLASDFGLSSAQIKAVVGVRANESKGIKEQRGALIKNERHVIQAAGFRMPEEVRSERPVEIEKLTNPLVRQTLSQLRKVLHAVAHTHGLEGDQPFDVVRIELTRDVRSNYRARKETNQRQRQNEKDNKAAEKMIEDFAPGAKISYDHRRRARLWKEQGEQCLYCGQPISSIEAFTGATELDHILPQSRTLDNSMANLALVHAHENQEKGNRTLTEWLGPEDAFEIAMRAKKYIPYPHWKPKMRRIEAIDVADAPVPEALLVQTGYINSVARDFIRQELGMKAEVSSGRITASLLYHTGLKKDGEDHRRHAQDAAIVAICDRRTSLRLAKAYKKKEATGSYSGESEYGGFEPWEGFREQVKACYTDINVSHAVKGKMSGQWHEETYYGKVESPY

SEQ ID NO: 9250 - protein, 992 aa, synthetic construct
  REGION 1..992: note = Synthetic
MQRVLGLDLGTNSIGWAVIDVPDEGEDAGAVVAMGSRIFTAGAEADGSALSTPMRDRREKRSMRRQVQRRAKRRRRIREELAGLGLLPADDAEFEDLMATDPADLLDRSAAGEELSLREIGRVVYWFSSRRGFLSLRSGGGDLTDDDDDRAVRSRYRRDQVNAETGEIVERGQENLLVGFLGEQAVHHPGLLTDEVIFGARGRLTYPVRPIRRGNYLSGGSALDEFGIHGLVFFQRSVYWDEGTIGSCSIDPKNGGSRALRADRLAQKYRVWKTIIDLRVGTPERPLGDDERRVVFDALMSQKTMAFSKLRKVLGLDPDCPINFERSAREALAGNETDAVLRSVVEDSWDEMSEPDRDRLASLLLGNADERQLAPTLRAEFGLSPDQVQKALNARFPGGRAAFGRRTLRRLLEAIPSCDTERDAIKAAGFAAPEAVRAERTVDMGDITNPLVRKTLVQLSKLLPSVSATFGKDPDVPFDVVRIELTRDVRQNYRTRQETNKRQRELEKKNAAARDAIDEFAPGKNASRDRIRRHRLWVEQGEACLYCGQPISAVALFGNSFELDHILPRSRTLDDSMANLALVHADENLDKGDRTPVEWKGPDGAEEIAERARGDLPKRVWLGKVRRILSEEVDADVPPEALLVQTGYINSLARDFVRQELDTTVEVSSGRLTAALRYRLGLDKDDDDHRRHAQDAAMVALTDLRTARALANHYRRERDHGIARSERYGSFEPWEGLRADLLDHYDRINVSHVAKGKVSGQLHNETHYGKVTSPHLELDDGYAFRRPLSAINAPGRLAEVADPAVRAALVTNLESRGLSAETGPLKFDEADPPKMPDGTVIKKVRCHKNYPGNRIIRPDTQPKTAVAMESNYVGFVYENTRTGRWRVHVVQRFDAFKVRNVPLRELRTRFAEEDERFLFSATIGTTLQLTEGDETGLFHVKRLDSSSQRFDLRPLNQTATGSQTWYSPTALKKANASKVVILPSGEVRTAGD

SEQ ID NO: 9251 - protein, 935 aa, synthetic construct
  REGION 1..935: note = Synthetic
MKRVLGLDLGTNSIGWAVIDVPEDGDGPGATGSVVAMGSRIFAEGAEADGKALSTKAKERRQARSMRRQVLRRAKRRRRIREELCNLGLLPADEGEFENLMAVDPAELQRRSGAGEVLSLREIGRVVYWFSSRRGFLSLRSGGGDLTDDDDDRAVRNRYRNDQVRSDTGEILERGQENLLVDFLRAQAAHHPGLLTDEIIFGARGRLSYPVRPIRRDNYLSGGSALEEFGIHGLVFFQRSVYWDEGTIGRCSIDPNDGGNRALRADRLAQKYRVWKTVIDLRVGGSKRTLGKDERTLDEDERQKLFDALMSQKTMAFSKLRKVLGLDPDCPINFERSEREALVGNETDAVLRSVVKDSWDGLSEPDRDRLASLLLGNADERQLSATLRAEFGLSSEQVEKALGARFPAGRAAFGRRTLRRLLEVIPSSNTELAAIKAAGFDAPEVVRAGRTVEVGDITNPLVRKTLGQLSKLLPALASTFGRDPEAPFDVVRIELTRDVRQNYRTRQETNKRQRGFEKANAAARAAIDEFAPGKKASRDRIRRHRLWKEQGEACLYCGQPISAVALFGSGFELDHILPRSRTLDDSLANLALVHADENLDKGDRTPVEWKGLDGAHEIAERAKGDLPKRVWLGKVRRILNEEVDADVPPAALLVETGYINNLARDFVRQVLDTTVQVSSGRLTAALRYRLGLEKDDDDHRRHAQDAAMVALCDLRTARALANQYRRERDHGIRRSERYGSFEPWVGLRTDLLDHYGRINVSHVAKGKVSGQLHKETHYGKVESPHLELDHGYAFRRPLSAINTPGRLAEVADPAVRAALVADLERRGLSAETGPFKFDAADPPKMPDGTVVNKARCHKNYPGNRIIRPDTQPKTAVAMENNYVGFVYENTRTGRWRVRVVQRFDAFKLRNVPLRELRTRFAQEDERFLFSATIGT

SEQ ID NO: 9252 - protein, 1002 aa, synthetic construct
  REGION 1..1002: note = Synthetic
MKRVLGLDLGTNSIGWAVIDVPEDGDGPGATGSVVAMGSRIFAEGAEADGKALSTKAKERRQARSMRRQVLRRAKRRRRIREELCNLGLLPADEGEFENLMAVDPAELQRRSGAGEVLSLREIGRVVYWFSSRRGFLSLRSGGGDLTDDDDDRAVRNRYRNDQVRSDTGEILERGQENLLVDFLRAQAAHHPGLLTDEIIFGARGRLSYPVRPIRRDNYLSGGSALEEFGIHGLVFFQRSVYWDEGTIGRCSIDPNDGGNRALRADRLAQKYRVWKTVIDLRVGGSKRTLGKDERTLDEDERQKLFDALMSQKTMAFSKLRKVLGLDPDCPINFERSEREALVGNETDAVLRSVVKDSWDGLSEPDRDRLASLLLGNADERQLSATLRAEFGLSSEQVEKALGARFPAGRAAFGRRTLRRLLEVIPSSNTELAAIKAAGFDAPEVVRAGRTVEVGDITNPLVRKTLGQLSKLLPALASTFGRDPEAPFDVVRIELTRDVRQNYRTRQETNKRQRGFEKANAAARAAIDEFAPGKKASRDRIRRHRLWKEQGEACLYCGQPISAVALFGSGFELDHILPRSRTLDDSLANLALVHADENLDKGDRTPVEWKGLDGAHEIAERAKGDLPKRVWLGKVRRILNEEVDADVPPAALLVETGYINNLARDFVRQVLDTTVQVSSGRLTAALRYRLGLEKDDDDHRRHAQDAAMVALCDLRTARALANQYRRERDHGIRRSERYGSFEPWVGLRTDLLDHYGRINVSHVAKGKVSGQLHKETHYGKVESPHLELDHGYAFRRPLSAINTPGRLAEVADPAVRATLVADLERRGLSAETGPFKFDAADPPKMPDGTVVNKARCHKNYPGNRIIRPDTQPKTAVAMENNYVGFVYENTRTGRWRVRVVQRFDAFKLRNVPLRELRTRFAQEDERFLFSATIGTTLQLTEGDTTGLFHVKNLDSDGRRFDLRPLNQTAGGSQNRYGASALQKANASKVVVLPSGEVRTARD

SEQ ID NO: 9253 - protein, 1002 aa, synthetic construct
  REGION 1..1002: note = Synthetic
MKRVLGLDLGTNSIGWAVIDVPEDGDGPGATGSVVAMGSRIFAEGAEADGKALSTKAKERRQARSMRRQVLRRAKRRRRIREELCNLGLLPADEGEFENLMAVDPAELQRRSGAGEVLSLREIGRVVYWFSSRRGFLSLRSGGGDLTDDDDDRAVRNRYRNDQVRSDTGEILERGQENLLVDFLRAQAAHHPGLLTDEIIFGARGRLSYPVRPIRRDNYLSGGSALEEFGIHGLVFFQRSVYWDEGTIGRCSIDPNDGGNRALRADRLAQKYRVWKTVIDLRVGGSKRTLGKDERTLDEDERQKLFDALMSQKTMAFSKLRKVLGLDPDCPINFERSEREALVGNETDAVLRSVVKDSWDGLSEPDRDRLASLLLGNADERQLSATLRAEFGLSSEQVEKALGARFPAGRAAFGRRTLRRLLEVIPSSNTELAAIKAAGFDAPEVVRAGRTVEVGDITNPLVRKTLGQLSKLLPALASTFGRDPEAPFDVVRIELTRDVRQNYRTRQETNKRQRGFEKANAAARAAIDEFAPGKKASRDRIRRHRLWKEQGEACLYCGQPISAVALFGSGFELDHILPRSRTLDDSLANLALVHADENLDKGDRTPVEWKGLDGAHEIAERAKGDLPKRVWLGKVRRILNEEVDADVPPAALLVETGYINNLARDFVRQVLDTTVQVSSGRLTAALRYRLGLEKDDDDHRRHAQDAAMVALCDLRTARALANQYRRERDHGIRRSERYGSFEPWVGLRTDLLDHYSRINVSHVAKGKVSGQLHKETHYGKVESPHLELDHGYAFRRPLSAINTPGRLAEVADPAVRATLVADLERRGLSAETGPFKFDAADPPKMPDGTVVNKARCHKNYPGNRIIRPDTQPKTAVAMENNYVGFVYENTRTGRWRVHVVQRFDAFKLRNVPLRELRTRFAQEDERFLFSATIGTTLQLTEGDTTGLFHVKNLDSDGRRFDLRPLNQTAGASQNRYGASALQKANASKVVVLPSGEVRTARD

SEQ ID NO: 9254 - protein, 1002 aa, synthetic construct
  REGION 1..1002: note = Synthetic
MKRVLGLDLGTNSIGWAVIDVPEDGDGPGATGSVVAMGSRIFAEGAEADGKALSTKAKERRQARSMRRQVLRRAKRRRRIREELCNLGLLPADEGEFENLMAVDPAELQRRSGAGEVLSLREIGRVVYWFSSRRGFLSLRSGGGDLTDDDDDRAVRNRYRNDQVRSDTGEILERGQENLLVDFLRAQAAHHPGLLTDEIIFGARGRLSYPVHPIRRDNYLSGGSALEEFGIHGLVFFQRSVYWDEGTIGRCSIDPNDGGNRALRADRLAQKYRVWKTLIELRVGGSKRTLGKDERTLDEDERQKLFDAMMSQKTMAFSKLRKVLGLDPDCPINFERSEREALVGNETDAVLRSVVKDSWDGLSEPDRDRLASLLLGNADERQLSATLRAEFGLSSEQVEKALGARFPAGRAAFGRRTLRRLLEVIPSSNTELAAIKAAGFDAPEVVRAGRTVEVGDITNPLVRKTLGQLSKLLPALASTFGRDPEAPFDVVRIELTRDVRQNYRTRQETNKRQRGFEKANAAARAAIDEFAPGKKASRDRIRRHRLWKEQGEACLYCGQPISAVALFGSGFELDHILPRSRTLDDSLANLALVHADENLDKGDRTPVEWKGLDGAHEIAERAKGDLPKGVWLGKVRRILNEEVDADVPPAALLVETGYINNLARDFVRQVLDTTVQVSSGRLTAALRYRLGLEKDDDDHRRHAQDAAMVALCDLRTARALANHYRRERDHGIRRSERYGSFEPWVGLRTDLLDHYSRINVSHVAKGKVSGQLHKETHYGKVESPHLELDHGYAFRRPLSAINTPGRLAEVADPAVRATLVADLERRGLSAETGPFKFDAADPPKMPDGTVVNKARCHKNYPGNRIIRPDTQPKTAVAMENNYVGFVYENTRTGRWRVRVVQRFDAFKLRNVPLRELRTLFSQEDERFLFSATIGTTLQLTEGDTTGLFHVKSLDSDGRRFDLRPLNQTAGASQNRYGASTLKKANASKVVVLPSGEVRTARD

SEQ ID NO: 9255 - protein, 754 aa, synthetic construct
  REGION 1..754: note = Synthetic
MKRVLGLDLGTNSIGWAVIDVPEDGDGPGATGSVVAMGSRIFAEGAEADGKALSTKAKERRQARSMRRQVLRRAKRRRRIREELCNLGLLPADEGEFENLMAVDPAELQRRSGAGEVLSLREIGRVVYWFSSRRGFLSLRSGGGDLTDDDDDRAVRNRYRNDQVRSDTGEILERGQENLLVDFLRAQAAHHPGLLTDEIIFGARGRLSYPVRPIRRDNYLSGGSALEEFGIHGLVFFQRSVYWDEGTIGRCSIDPNDGGNRALRADRLAQKYRVWKTVIDLRVGGSKRTLGKDERTLDEDERQKLFDALMSQKTMAFSKLRKVLGLDPDCPINFERSEREALVGNETDAVLRSVVKDSWDGLSEPDRDRLASLLLGNADERQLSATLRAEFGLSSEQVEKALGARFPAGRAAFGRRTLRRLLEVIPSSNTELAAIKAAGFDAPEVVRAGRTVEVGDITNPLVRKTLGQLSKLLPALASTFGRDPEAPFDVVRIELTRDVRQNYRTRQETNKRQRGFEKANAAARAAIDEFAPGKKASRDRIRRHRLWKEQGEACLYCGQPISAVALFGSGFELDHILPRSRTLDDSLANLALVHADENLDKGDRTPVEWKGLDGAHEIAERAKGDLPKGVWLGKVRRILNEEVDADVPPAALLVETGYINNLARDFVRQVLDTTVQVSSGRLTAALRYRLGLEKDDDDHRRHAQDAAMVALCDLRTARALANQYRRERDHGIRRSERYGSFEPWVGLRTDLLDH

SEQ ID NO: 9256 - protein, 1002 aa, synthetic construct
  REGION 1..1002: note = Synthetic
MERVLGLDLGTNSIGWAVIDVPEDGDGPGATGSVVAMGSRIFAEGAEADGKALSTKAKERRQARSMRRQVLRRAKRRRRIREELCNLGLLPADEGEFENLMAVDPAELQRRSGAGEVLSLREIGRVVYWFSSRRGFLSLRSGGGDLTDDDDDRAVRNRYRNDQVRSDTGEILERGQENLLVDFLRAQAAHHPGLLTDEIIFGARGRLSYPVRPIRRDNYLSGGSALEEFGIHGLVFFQRSVYWDEGTIGRCSIDPNDGGNRALRADRLAQKYRVWKTVIDLRVGGSKRTLGKDERTLDEDERQKLFDALMSQKTMAFSKLRKVLGLDPDCPINFERSEREALVGNETDAVLRSVVKDSWDGLSEPDRDRLASLLLGNADERQLSATLRAEFGLSSEQVEKALGARFPAGRAAFGRRTLRRLLEVIPSSNTELAAIKAAGFDAPEVVRAGRTVEVGDITNPLVRKTLGQLSKLLPALASTFGRDPEAPFDVVRIELTRDVRQNYRTRQETNKRQRGFEKANAAARAAIDEFAPGKKASRDRIRRHRLWKEQGEACLYCGQPISAVALFGSGFELDHILPRSRTLDDSLANLALVHADENLDKGDRTPVEWKGLDGAHEIAERAKGDLPKGVWLGKVRRILNEEVDADVPPAALLVETGYINNLARDFVRQVLDTTVQVSSGRLTAALRYRLGLEKDDDDHRRHAQDAAMVALCDLRTARALANQYRRERDHGIRRSERYGSFEPWVGLRTDLLDHYSRINVSHVAKGKVSGQLHKETHYGKVESPHLELDHGYAFRRPLSAINTPGRLAEVADPAVRATLVADLERRGLSAETGPFKFDAADPPKMPDGTVVNKARCHKNYPGNRIIRPDTQPKTAVAMENNYVGFVYENTRTGRWRVRVVQRFDAFKLRNVPLRELRTRFAQEDERFLFSATIGTTLQLTEGDTTGLFHVKNLDSDGRRFDLRPLNQTAGGSQNRYGASALQKANASKVVVLPSGEVRTARD

SEQ ID NO: 9257 - protein, 865 aa, synthetic construct
  REGION 1..865: note = Synthetic
MERVLGLDLGTNSIGWAVIDVPEDGDGPGATGSVVAMGSRIFAEGAEADGKALSTKAKERRQARSMRRQVLRRAKRRRRIREELCNLGLLPADEGEFENLMAVDPAELQRRSGAGEVLSLREIGRVVYWFSSRRGFLSLRSGGGDLTDDDDDRAVRNRYRNDQVRSDTGEILERGQENLLVDFLRAQAAHHPGLLTDEIIFGARGRLSYPVHPIRRDNYLSGGSALEEFGIHGLVFFQRSVYWDEGTIGRCSIDPNDGGNRALRADRLAQKYRVWKTVIDLRVGGSKRTLGKDERTLDEDERQKLFDALMSQKTMAFSKLRKVLGLDPDCPINFERSEREALVGNETDAVLRSVVKDSWDGLSEPDRDRLASLLLGNADERQLSATLRAEFGLSSEQVEKALGARFPAGRAAFGRRTLRRLLEVIPSSNTELAAIKAAGFDAPEVVRAGRTVEVGDITNPLVRKTLGQLSKLLPALASTFGRDPEAPFDVVRIELTRDVRQNYRTRQETNKRQRGFEKANAAARAAIDEFAPGKKASRDRIRRHRLWKEQGEACLYCGQPISAVALFGSGFELDHILPRSRTLDDSLANLALVHADENLDKGDRTPVEWKGLDGAHEIAERAKGDLPKGVWLGKVRRILNEEVDADVPPAALLVETGYINNLARDFVRQVLDTTVQVSSGRLTAALRYRLGLEKDDDDHRRHAQDAAMVALCDLRTARALANQYRRERDHGIRRSERYGSFEPWVGLRTDLLDHYGRINVSHVAKGKVSGQLHKETHYGKVESPHLELDHGYAFRRPLSAINTPGRLAEVADPAVRAALVADLERRGLSAETGPFKFDAADPPKMPDGTVVNKARCHKNFPGNRI

SEQ ID NO: 9258 - protein, 705 aa, synthetic construct
  REGION 1..705: note = Synthetic
MERVLGLDLGTNSIGWAVIDVPEDGDGPGATGSVVAMGSRIFAEGAEADGKALSTKAKERRQARSMRRQVLRRAKRRRRIREELCNLGLLPADEGEFENLMAVDPAELQRRSGAGEVLSLREIGRVVYWFSSRRGFLSLRSGGGDLTDDDDDRAVRNRYRNDQVRSDTGEILERGQENLLVDFLRAQAAHHPGLLTDEIIFGARGRLSYPVRPIRRDNYLSGGSALEEFGIHGLVFFQRSVYWDEGTIGRCSIDPNDGGNRALRADRLAQKYRVWKTVIDLRVGGSKRTLGKDERTLDEDERQKLFDALMSQKTMAFSKLRKVLGLDPDCPINFERSEREALVGNETDAVLRSVVKDSWDGLSEPDRDRLASLLLGNADERQLSATLRAEFGLSSEQVEKALGARFPAGRAAFGRRTLRRLLEVIPSSNTELAAIKAAGFDAPEVVRAGRTVEVGDITNPLVRKTLGQLSKLLPALASTFGRDPEAPFDVVRIELTRDVRQNYRTRQETNKRQRGFEKANAAARAAIDEFAPGKKASRDRIRRHRLWKEQGEACLYCGQPISAVALFGSGFELDHILPRSRTLDDSLANLALVHADENLDKGDRTPVEWKGLDGAHEIAERAKGDLPKRVWLGKVRRILNEEVDADVPPAALLVETGYINNLARDFVRQVLDTTVQVSSGRLTAALRYRLGLEKDDDDHRRHAQD

SEQ ID NO: 9259 - protein, 990 aa, synthetic construct
  REGION 1..990: note = Synthetic
SIGWAVIDVPEDGDGPGATGSVVAMGSRIFAEGAEADGKALSTKAKERRQARSMRRQVLRRAKRRRRIREELCNLGLLPADEGEFENLMAVDPAELQRRSGAGEVLSLREIGRVVYWFSSRRGFLSLRSGGGDLTDDDDDRAVRNRYRNDQVRSDTGEILERGQENLLVDFLRAQAAHHPGLLTDEIIFGARGRLSYPVRPIRRDNYLSGGSALEEFGIHGLVFFQRSVYWDEGTIGRCSIDPNDGGNRALRADRLAQKYRVWKTVIDLRVGGSKRTLGKDERTLDEDERQKLFDALMSQKTMAFSKLRKVLGLDPDCPINFERSEREALVGNETDAVLRSVVKDSWDGLSEPDRDRLASLLLGNADERQLSATLRAEFGLSSEQVEKALGARFPAGRAAFGRRTLRRLLEVIPSSNTELAAIKAAGFDAPEVVRAGRTVEVGDITNPLVRKTLGQLSKLLPALASTFGRDPEAPFDVVRIELTRDVRQNYRTRQETNKRQRGFEKANAAARAAIDEFAPGKKASRDRIRRHRLWKEQGEACLYCGQPISAVALFGSGFELDHILPRSRTLDDSLANLALVHADENLDKGDRTPVEWKGLDGAHEIAERAKGDLPKGVWLGKVRRILNEEVDADVPPAALLVETGYINNLARDFVRQVLDTTVQVSSGRLTAALRYRLGLEKDDDDHRRHAQDAAMVALCDLRTARALANHYRRERDHGIRRSERYGSFEPWVGLRTDLLDHYSRINVSHVAKGKVSGQLHKETHYGKVESPHLELDHGYAFRRPLSAINTPGRLAEVADPAVRATLVADLERRGLSAETGPFKFDAADPPKMPDGTVVNKARCHKNYPGNRIIRPDTQPKTAVAMENNYVGFVYENTRTGRWRVRVVQRFDAFKLRNVPLRELRTRFAQEDERFLFSATIGTTLQLTEGDTTGLFHVKNLDSDGRRFDLRPLNQTAGGSQNRYGASALQKANASKVVVLPSGEVRTARD

SEQ ID NO: 9260 - protein, 1002 aa, synthetic construct
  REGION 1..1002: note = Synthetic
MKRVLGLDLGTNSIGWAVIDVPEDGDGPGATGSVVAMGSRIFAEGAEADGKALSTKAKERRQARSMRRQVLRRAKRRRRIREELCNLGLLPADEGEFENLMAVDPAELQRRSGAGEVLSLREIGRVVYWFSSRRGFLSLRSGGGDLTDDDDDRAVRNRYRNDQVRSDTGEILERGQENLLVDFLRAQAAHHPGLLTDEIIFGARGRLSYPVRPIRRDNYLSGGSALEEFGIHGLVFFQRSVYWDEGTIGRCSIDPNDGGNRALRADRLAQKYRVWKTVIDLRVGGSKRTLGKDERTLDEDERQKLFDALMSQKTMAFSKLRKVLGLDPDCPINFERSEREALVGNETDAVLRSVVKDSWDGLSEPDRDRLASLLLGNADERQLSATLRAEFGLSSEQVEKALGARFPAGRAAFGRRTLRRLLEVIPSSNTELDAIKAAGFDAPEVVRAGRTVEVGDITNPLVRKTLGQLSKLLPALASTFGRDPEAPFDVVRIELTRDVRQNYRTRQETNKRQRGFEKANAAARAAIDEFAPGKKASRDRIRRHRLWKEQGEACLYCGQPISAVALFGSGFELDHILPRSRTLDDSLANLALVHADENLDKGDRTPVEWKGLDGAHEIAERAKGDLPKGVWLGKVRRILNEEVDADVPPAALLVETGYINNLARDFVRQVLDTTVQVSSGRLTAALRYRLGLEKDDDDHRRHAQDAAMVALCDLRTARALANHYRRERDHGIRRSERYGSFEPWVGLRTDLLDHYSRINVSHVAKGKVSGQLHKETHYGKVESPHLELDHGYAFRRPLSAINTPGRLAEVADPAVRATLVADLERRGLSAETGPFKFDAADPPKMPDGTVVNKARCHKNYPGNRIIRPDTQPKTAVAMENNYVGFVYENTRTGRWRVRVVQRFDAFKLRNVPLRELRTRFAQEDERFLFSATIGTTLQLTEGDTTGLFHVKNLDSDGRRFDLRPLNQTAGGSQNRYGASALQKANASKVVVLPSGEVRTARD

SEQ ID NO: 9261 - protein, 857 aa, synthetic construct
  REGION 1..857: note = Synthetic
MERVLGLDLGTNSIGWAVIDVPEDGDGPGATGSVVAMGSRIFAEGAEADGKALSTKAKERRQARSMRRQVLRRAKRRRRIREELCNLGLLPADEGEFENLMAVDPAELQRRSGAGEVLSLREIGRVVYWFSSRRGFLSLRSGGGDLTDDDDDRAVRNRYRNDQVRSDTGEILERGQENLLVDFLRAQAAHHPGLLTDEIIFGARGRLSYPVRPIRRDNYLSGGSALEEFGIHGLVFFQRSVYWDEGTIGRCSIDPNDGGNRALRADRLAQKYRVWKTVIDLRVGGSKRTLGKDERTLDEDERQKLFDALMSQKTMAFSKLRKVLGLDPDCPINFERSEREALVGNETDAVLRSVVKDSWDGLSEPDRDRLASLLLGNADERQLSATLRAEFGLSSEQVEKALGARFPAGRAAFGRRTLRRLLEVIPSSNTELDAIKAAGFDAPEVVRAGRTVEVGDITNPLVRKTLGQLSKLLPALASTFGRDPEAPFDVVRIELTRDVRQNYRTRQETNKRQRGFEKANAAARAAIDEFAPGKKASRDRIRRHRLWKEQGEACLYCGQPISAVALFGSGFELDHILPRSRTLDDSLANLALVHADENLDKGDRTPVEWKGLDGAHEIAERAKGDLPKGVWLGKVRRILNEEVDADVPPAALLVETGYINNLARDFVRQVLDTTVQVSSGRLTAALRYRLGLEKDDDDHRRHAQDAAMVALCDLRTARALANQYRRERDHGIRRSERYGSFEPWVGLRTDLLDHYSRINVSHVAKGKVSGQLHKETHYGKVESPHLELDHGYAFRRPLSAINTPGRLAEVADPAVRATLVADLERRGLSAETGPFKFDAADPPKMPDGTVVNKARCH

SEQ ID NO: 9262 - protein, 1002 aa, synthetic construct
  REGION 1..1002: note = Synthetic
MERVLGLDLGTNSIGWAVIDVPEDGDGPGATGSVVAMGSRIFAEGAEADGKALSTKAKERRQARSMRRQVLRRAKRRRRIREELCNLGLLPADEGEFENLMAVDPAELQRRSGAGEVLSLREIGRVVYWFSSRRGFLSLRSGGGDLTDDDDDRAVRNRYRNDQVRSDTGEILERGQENLLVDFLRAQAAHHPGLLTDEIIFGARGRLSYPVRPIRRDNYLSGGSALEEFGIHGLVFFQRSVYWDEGTIGRCSIDPNDGGNRALRADRLAQKYRVWKTVIDLRVGGSKRTLGKDERTLDEDERQKLFDALMSQKTMAFSKLRKVLGLDPDCPINFERSEREALVGNETDAVLRSVVKDSWDGLSEPDRDRLASLLLGNADERQLSATLRAEFGLSSEQVEKALGARFPAGRAAFGRRTLRRLLEVIPSSNTELDAIKAAGFDAPEVVRAGRTVEVGDITNPLVRKTLGQLSKLLPALASTFGRDPEAPFDVVRIELTRDVRQNYRTRQETNKRQRGFEKANAAARAAIDEFAPGKKASRDRIRRHRLWKEQGEACLYCGQPISAVALFGSGFELDHILPRSRTLDDSLANLALVHADENLDKGDRTPVEWKGLDGAHEIAERAKGDLPKGVWLGKVRRILNEEVDADVPPAALLVETGYINNLARDFVRQVLDTTVQVSSGRLTAALRYRLGLEKDDDDHRRHAQDAAMVALCDLRTARALANQYRRERDHGIRRSERYGSFEPWVGLRTDLLDHYSRINVSHVAKGKVSGQLHKETHYGKVESPHLELDHGYAFRRPLSAINTPGRLAEVADPAVRATLVADLERRGLSAETGPFKFDAADPPKMPDGTVVNKARCHKNYPGNRIIRPDTQPKTAVAMENNYVGFVYENTRTGRWRVRVVQRFDAFKLRNVPLRELRTRFAQEDERFLFSATIGTTLQLTEGDTTGLFHVKNLDSDGRRFDLRPLNQTAGVSQNRYGASALQKANASKVVVLPSGEVRTARD

SEQ ID NO: 9263 - protein, 1025 aa, synthetic construct
  REGION 1..1025: note = Synthetic
MRYVLGLDLGPTSIGWAVLSLNEEGEPTGFLSIPDGANTITGIGVRIFPAGVEGEGKNEKPRNRDRRDARGLRRTLRRRRGRKLALRAVLRKANLLPADNDGLLRLMQDTDPLVLRVRGLDYALQPVEFGRALIHLAQRRGFKSNRRQADEEEEGKVLDGIKATQGRMAESRARTIGELFCKARETDARARLHNAPDNYHWSFSRAECEDEFNKLWDAQQCHHPTMLTEELRQAIHEIIFRQIPFELSKRKRRKVIGRCPLEKYQPRCPLSSRLAQEFRILQQVNDFRIRAPEGDQTLSTEQRNAVIAALNREKEVTFDKLRKLLKLPAEARFNFEYEGREELTGNQIDHALDGIFKAAKRGRPSRWELFDEQTRDTIWQAVLGDDDALRARAQRDWGLDEEQAGKICKIRPPAGHLRYSEKALTRLIPHLREGLNLYEACGAAGYENTWSARDCLPIPDSNHGLPITNPAVRSALFQVRRLVNALIRELGKPKRIVVELVRDMNASRKSKEAMIKDMARRKKERQIAREVIAERIPEPTDALIAKVRLWQEMDTRCPYCELPISTEDLLDENRSEVDHVLPYSHSLDNSFDNKVVCHTRCNREKGERTPKDWLAGDPERWTVVQKQIAHLGGHFGKNLRKHHRFFLTAEEIPDQLERQLVDTAYLERTVADYLRRLYEHDEYTKVTTTRGGITAQLRRRWGLDKLLSSDGEPEKNREDHRHHAVDAAVVAATSSKLVKRVTEYLKEHWVRRREDKNKLRTPMPWEDFRLDLEHALQTLNVSHRVTRRIAGPLHLDTIYGPCKDGKFAHRVRLTDLTGSKIEDIPDPVIRELVENRCRAHGIEPSDLDAKSAKTVFAKPLPMRVGSGKAPRNITRVRIHEVIGTPIVLRNRVVQSGSNHHVEIVELTSGKKAGQREGKIVSTYEAAQRQRRRRPVISREHGADRRFVMSLAINETVRLRFEDGTVPLYRVQKMDVNGTIVFRPVTFAGKMSDRDKPPLIIRRTANSLQAKKVTVDPLGRIRDAHD

SEQ ID NO: 9264 - protein, 1024 aa, synthetic construct
  REGION 1..1024: note = Synthetic
MPITLGLDLGTNSIGWALLETQGDSQGRILAAGVRIFQEGVEKDEAKGTVEAKNAKRRATRMARRMKLRKKRRRAKLLRLLQKHGLLPENQDELRKILDKDPYEIRDRAVREKIELHELGRALYHICQRRGFKSGRKDRVKEIDPSASKKEQEKKQETGKVLKAIGELEKKLTESGSLTLGQYLHKQILEGKAGQRWNTHRVRNQYTLRRMYTDEVNAIWRQQQAYYPKLLTLGLREQVDQAIFHQRKLKPQTHLIGDCELEPGEKRCPKQSWFAQQFRLWKEVNNLVVLMPLGKEEPVPEEKRVELVQKLMQQKSMTFSAIRKILGIPLDSHKLNLEEGKRDKLLGNAAEATLIKAFGDGWERLTEEQRDQHRIKFDELMLEEDPDEFKKSAEEAFPGLSAKQIEMLMDYSGPTGYMGYSRKALQKLLPWMKQGMKEYDAKIAVYGERAGNAPALNKLPPVGRNIRNPVVVRTLTETRKVVNCLLRKYPAPDFIRIELVREMKQGVEKRNERVKDNREREKQKETIALEIGKEGVEMNRENWQKYLLAKEQEWKCPYTGKGFGLAELYSRDNLMEVDHIIPYSRCLNDGMMNKVVAFASANREKGNRTPREWKSGKDFEDMWKRVKDLPWPKRNRFSQEKIELDQFLERQLVDTGYIAREVVGYVGQLFPESERLKQVQVTRGGVTSELRHQWGLNSILHPDEQNLKFRDDHRHHAIDAIVIALTTRSHIKRLAVAHKSNLIPQPMPEPWKNFRGDVEKTIDGVLVSHRPDRKVSGPLHEETILGPTKEQDVYTKRVKLTALTGAAVGKIRDDVVREIVTQRCRDFDIEPGSWKKLIPPKVWKEPLYMQTLSGKRGPEIRSVRVTATAGNPLKFPPENPTRVVEPGSNHHIEFVEAKDKKGAPSLLARVVTTFEAKQRQSKGLPVVDRNPGEAMKFKYSLTINDVVEVNDNGKKILCRVQKISVVGERIFKTGMNIALRGLSQGGAVSESKSLYNIQSTNSWAALHIKKLNMDPIGSYTMAND

SEQ ID NO: 9265 - protein, 1073 aa, synthetic construct
  REGION 1..1073: note = Synthetic
MKTRLGLDLGEKSIGWAILNESDDGFAGVLDCGVRIFPAGAKIDERDGSAITPSADRRAHRGARRTKERRRRRKNSLKRALTSYGLAPHDPTEWEAVLLADPYELRNRALAEALEPFEIGRVLYHLCQRRGFKSNRKSEGEAKKEEGVVKKEIGELSAHMEAAGTPTVGSYFHRLRRDSKGVDRRVRNHRTSRKMYEDEFSTLWNKQAVYHPNLMTDDARGKIHHAIFHQRPFELTEERRLTLPPAANAHRAPQVATCPLIKDEPRCPKGRSIAQRFRILKEVNNLRANRPDGTEVELSKEDRLALVEQLSSQKQMTFSKMRKLLKLPDDVRFNLEEGKRKYLDGNTVEYALANAFGKKEWSQLERHEKDRFVMLLDIADEGEFRAQAKALGLSDEAIDELSDLATPSGYLAYSEAVIGVLIPYLEEGMNEYDAIQAAREAKELPEDEQPEQYDFLPQIPDVTNPIVKRALREMRLVVNAVIRAYGKPDKIVVELAREMKQNRQGRQNTINRIRDNEKLNKQADAFFEAAGRSFVSNTDRQIYRLWQEQGEVCPYSGRKISMRNILSAENDLDVDHILPYSRTFDNTMMNKVLCFADSNRDKKDRTPYEWRHGSKDYDEMLTRIANMSLMPDRKKSRFSMAELKDDEFVERQLRDTAFVTREAVKYLELLYPRELRTGQKAVETRPGGVTAELRKEWGLNHLIGGPWGKKNRDNHKHHALDAVVVACSTRAQLQQLTRLYQQRESIGQSNTASFAPPWPSFVEEVDHLLNKREQTWKINGREITTRGLLVSTRVERKIRGKFHDESIYGPSKEYRNQLQTPQHKSAHLGPKGEFRIRIEVEKLNAQKLVDENKPYICDQAVRQAILDYCKARGVDPSNGGKFPPTKNFFGELTMPRRHSDGLPNPIRNVRIWKHIGEPFLIPDADGIFARAVNLKNNHHIEFVEITNDQGKKENRAVVVSMLEAANRVRRHKVEMVRRDHGEGSRFLMSLASNESALIAKAEQFELCRVQEISGKSKLVKNMDVVFRRHDDARPAKNAKKDPFLRLRSFGSWDTMPIIKVTVDPLGRLHAAND

SEQ ID NO: 9266 - protein, 1080 aa, synthetic construct
  REGION 1..1080: note = Synthetic
MTIEGVTPPRYVLGLDLGETSVGWALVAYEGEEPQGIIDLGARVFPPGADVDERKGTATTLNQARREHRSARRNIRRRKDRKEKVRSLLRTRGFWPDAEGDEGEFLSMNPYRLRAMALDSQLSPEEFGRAIYNLAVRRGFKSNRKTDAAESDTGTVKEGIARLSGEVDEAGARTLGEFLWSLHQDEAQNCRSGVSIRNKGADYKRVSSRRMLEEEFEKIWTAQTAYHTALHDADFKESLYQAIFYQRPFELTAERLATMPSRANAQRAPSLAKCPLFQEEYRCSLAAWKAQRFRILKEIGDLRVVGRRGEFRFLTDPERTLVLSTLESYKKVTFKRLRKDLELSELESLNLERGKRDYMDGNEVEATLKGVKGFGKRWKAFDEDQRQGFRHLISNSEDEEQFLKRGLELGATKEELERIRTLRAPDGYLRYSEKALGVLLPYMNKGLDEHKALQAAREDGLLPATDATEEQPFLPAPEDLPNPIVMRTLHQMRKVVNAIIREWGKPWKIRVELARDLKNSGKQREEAASRRRDNEKRNDEAREFFQARGHQRVGRDDLLKYRLWHEQGMNCAYTGKPISDRMLTSDQNEVELDHIIPFSRSVDDSYMNKVLVATGANRDKGNQTPHEWLSGPDGEGYKGLLVRLGHMREMPDGKKRRFMLEDVDLDHNASRKLVDTRYISVQAAGYLALLYSPSERDGQKRVQTTSGQATAMLRHHWGANVLSADGQKTRDDHRHHAVDAVITACAERRHMLALANSHSGRADIDAERVHPPWISFRKDVEWMLLKRPRTWKIGDREITTHGTLVSHRVEKRIMDGLHKQSNYGISRRYLEEWGEKLTHAGVGPAGNFKKRIGVEGLNPKKLAKAKESNFLYICDETILKIIVAYCDEHAPGWEKLKGFKRGFFDGLTMPSGVPIRKVRTWYAFSQPAVFMDASGRPYRVVELGNNHRIDFFEKDKGDGRPLTCRVVPMLTAANELRRGTPAVAPESYRKLMSLHRGEMLFIDDGSSIRPTLVRVLKISGSMDVNSPSLDLSLVRHNDARPSQVITKESFGRIASLSAWTRSNVRKVVLSPIGQVIVAHD

SEQ ID NO: 9267 - protein, 1068 aa, synthetic construct; identical to SEQ ID NO: 6875
  REGION 1..1068: note = Synthetic

SEQ ID NO: 9268 - protein, 1051 aa, synthetic construct
  REGION 1..1051: note = Synthetic
MDYILGLDLGETSLGWAVIKVVDGQPAGLIDAGSRVFPPIVDRSANLSNPKIKNADRRMHRGARRVLARRVSRRESLQSALSDAGLLPESEKERAQLFAAVNPYEARAKALDEKLPPHELGRALYHLAQHRGFKSNRKEESSDDKEQGKVAKEIGTLQALITEAACRTLGEFLWRLGRDSRRLEYGETRLRNRRFSRDMVEAEFDAVWQAQQAHHPALLTEKLRARLHNNIFFQRDFAISDERRAALPKRANALRAPQLKACSLIPDEKRCGAGEWIAQQFRIWKEVNNLRVMEGHHAERPLTVEEAAKLVAGLIRQKKMTFGRMKTILGFAKDSHFNLEAGGRKDLDGNTVEAALATAFGKAWDALDEETKHERRSLLTHEESPEKLAEVARQWGLDDEAAEKLAKFKPKGSYLRYSAKAMEILLPYVEAGLMEYDAIVQATEDGKLPHSEETDPVDRLPGPPDLPNPNVMRCLHETRKVVNALLAMYGKPMRIVVELARDLKASGAEREAAVRRMRDNEKLNRQAREFFADHGNPEPSNTDLIRYRLWQEQECECPYSGRTITADHLLSHYNVLEIDHILPYSLSLDDSLQNKVLCFTDANRDKGQRTPFQWKGGPDSEAYEEMITRVRRYYHYNRGKLLKFQRAEIDVEEVIQQKLVDTRYASREVKTFLALLYPPAERVGEKRVQASPGRVTAILRYLWGLNTILNPEGDNEKSRLDHRHHTVDAVVIACTERRFVKALSDAAKRELRRDEMHVPPPWEGFRGEVERVLCRQVRTWNVDGREITTEGILVSHRAERKIGGALHEETSYGPTADPKVFTSRVKVENLTGAMVARIRDKTIRRIVREHLLAQDIDPAKKTGVTPAKAWQTMPQLPVSAARRRKDPTLPESIPIRKVRVLKTIDRPLLMPGPDGEPYRAVITGSNHHMEIVEEIDAKGRRKWVGIPVTMLEAARRARRANEPIIQRDHGEKRKFVMSLCKGEAVFVETNGEFNPYRVQKMDQQGRVWFRRLTDAGPVEQKKLLQKNVGALSGKIFKIALDAVGRVKSCHD

SEQ ID NO: 9269 - protein, 1054 aa, synthetic construct
  REGION 1..1054: note = Synthetic
MFEYTLGLDLGETSLGWAVIKTLDGEPIEMIDAGVRIFPAIVKREGTRQPENKNEERREKRSARRVKARRVNRKKRITEYLIKAGLLPKNETARSTLFNDKHLPPYDLRARALDEKLKPHEIGRVLYLLCQRRGFKSNRKSERKENDKGKVKAGIDEIQQAMENSGSRTLGEYFATLEKDDTKLCTGQLRIRDHYTDRRMIEDEFNAVWQAQAKHYPKLLTDALKENVYNAIFFQRDFAISEERRAKLPSRANAHRAPQLADCYLIPGEKRCARGAWIAQQFRLMKEVNNLRVFIDNQYRELTAAERKKLVQQMSRQGQMGFGKMRKLLTLPADALFNLEKGKWKTLDGNTVEKALLDAFGAKQWDALSEQQRLECRHVLIEEEDPEAFTVQAQQWELPAEMIDKLMSFSPPAGYLRMSVKAMEALLPYLVKGLDDIRAINQAKKDGKLPHQPQDDALDKLGNPPDLPNPNVMRCLYETKKVVNVLIREYGKPNKIHVELARELKQSEHQRLETINLIRENEAKRKTAKQWYEEMGRTNVSGKDILKYRLWQEQKSICPYSGQTIEASHLLAGDNLLQIDHILPRSKSYDDSYLNKVLCFTLYNRQKGNQTPYDWKGGPDSPGFQEMMTRVERLDLPLKKRERFMQPEINTDECLQRQLQDTRYASLEVAHHLACLYPPEERVGEKRIQATPGRATAILRRLWGLNTILSEDDNKNRTDHRHHAIDAVAIACTTRKHLHNLSNFYRRDHGEVTVFDPPWETFRDDVDRIFCKQQRTWKLGDREITTEGLLISHRVQRKLAGALHEETSYGPTPDPKVFAYRVKVPTLSGAKIMKIRDPRIRQIVIDHVKAQGFDPEEVGSKTFPTKVWQTLPQLPVSDKARRKAEAEGKPLPANIPICKVRIETTLDKPLMLHDQDGKPYRAVITGNNHHIEILETTDAKGNKKWIGKIVTMLEACNRARMTNQPIVQRDHGENNKFVMSLSIGETVFISRVNSALMPYRVQKIISNGQVYFRANREAGIVINKNLFSKYASTLKDIIIKAKVDPIGRLGTCND

SEQ ID NO: 9270 - protein, 980 aa, synthetic construct; identical to SEQ ID NO: 4915
  REGION 1..980: note = Synthetic

SEQ ID NO: 9271 - protein, 1005 aa, synthetic construct
  REGION 1..1005: note = Synthetic
MSHKVLGIDIGTNSLGWSLLDDEEGRILATGVRVFPEGVDRTQTGGEVSKNETRRTARGTRRQTRRRRERKETVRNALIEAGLFPKDPEQQTQLLEQNPYDLRQKGLTEKLTLQEFGRILYALSQRRGYKSNSKTDRKDQKATDGLLAEINQLQSEIEENHHKTLGEHFASELQSGNPIRGRHTLRAMYLEEFEQLWNAQAKHHPKKLTAKLKQRLNNPVETETWVHKGLIFGQRKMYWKKSTIGKCELEMKEVRCEKMDRLAQQFRLYQEVNNLRLIESGTERRLSPEERETLLEYLSTGKERTFDQIRKKLKLYQSAKFNLEEGDRSKLLGMPVDARLAHKNIFTKKWYQRPEQEKTEIVRFILDHDDTPDLIEEKALNEWGLDEEATAALLKIDLTEGRVNYSRKAIEKLLPFIIQGLPLTGKDDTENALHKAGYLRADQRSKSKTKRLPVPPDIPNPIVKQALHEVRKLVNTLIDEYGIPDAIHIEMARSVSGSADQRLQMSLKMRERERERDAAADYLRQEGFQVSRNNIDRYLLWKEQGEHCAYCDKNFSPPTMFNANSEIEVDHILPRSRSLDNSWMNKVVCCRDCNSAKGNQTPFEWLFKVSQKRYDKVLQGAARLPYLKRQRFSQPTLELNDFLERNLVDTGYIASEVRKYMSRLDTDVICTKGQLTSLYRRYWELNNILHDDGLNIKNRDDHRHHAIDAIIVALMNRSNLQKLSGFWKAARQAHLNQPWKNFRSEIEAAVNSIHVSHRTRRKISGALHEETIFGATKESATTYVRRKPISSINNTSQVEKVRDPQIKQIIKEYLQQHGVDIEKKSLKINEKIWADGVIMPSGVPVKKVRMLEESTGMLQIRPNQFTAPGSNHHIEIYELLDESGEPILNKDGSPKREGTIVTMFEAAQRAKNKQPLINRNHGSKTRFVMSLGINEMILLDVGQADPVLHRVQKLSLGRIILRPHTYAGQVNNSDKPPLVQRKSPNTLRGQKVTIDFLGRVRWAND

SEQ ID NO: 9272 - protein, 1005 aa, synthetic construct
  REGION 1..1005: note = Synthetic
MSHKVLGIDIGTNSLGWALLDDEEGRIIATGVRVFPEGVDRTQTGGEVSKNETRRTARGTRRQTRRRRERKQAVRNALIKARLFPQDPEQIEVLLQYNPYELRKKGLTKKLELFEFGRVLYALSQRRGYKSNSKTDRKDQKETEGLLAEINQLQSEIEEHKHKTLGEHFAEELKAGTPVRGRHTLRAMYLQEFELLWKTQSKYHSKILTEKLKKQLNNPDETENWVHKGLIYGQRKMYWKKSTIGKCELEPKEVRCEKSDRLAQQFRLYQEVNNLRLIESGTERTLSPEERETLLDYLSSAKERTFDQIRKKLNLYHSAKFNLEAGDRSKLLGMPVDALLAHKAIFTKKWHQRPDQEKTEIVRFILDHDDTQELIREKAINEWGLDEEATEALLRLDLTEGRANYSRKAIEKLLPYIKQGLPLSARDDTENALHQAGYSRADQRSKSKTNRLPVPPDIPNPIVKQALHEVRKLVNSLIDEFGIPDAIHIEMARTVSGSADQRLQTTIKMRERERERDAAANYLRQEGFQVTRNNIDRYLLWKEQGEHCAYCDKNFSPRMIFDSNSEIEIDHILPRSRSLDNSWMNKVVCCRKCNSEKAKQTPLEWLPRISQERYDTVLQSAARLPYPKRQRFSQKLEGLEDFIERNLVDTGYIASEVRKYISRLNTDVICTKGQLTSIYRRYWELNNILHDDGLNIKNRDDHRHHAIDAIVVALMNRSNLQKLSGFWKQTRQAHLKQPWKNFRSEIEAAVNSINVSHRTRRKISGALHEETIFGATQESATTYVRRKPVSSINNTSQVEKIRDPQIRKLVKDYLKQHGIDPDSKSQKINEKIWADGVYMPSGVPVKKVRMLEESSGMLEIRPNQFTAPGSNHHIEIFELLDKAGNPILNKDGSPKREGTIVTMFEAAQRAKNKQPLINRNHGPHARFVMSLGINEMILLDVGLEEPALHRVQKISNELIILRPHAFAGQVKDTDKPPLIQRKRPNSLRGQKVTVDHLGRIRRAND

SEQ ID NO: 9273 - protein, 763 aa, synthetic construct
  REGION 1..763: note = Synthetic
LEILNRTNPYELRRKALDERLTPHELGRVLFQLSQRRGFLSNRKSDSKSDDTKGLLAEINQLAKDVGEAGARTIGEYLAGLQVDPLTRLRGRHTRRAMFEEEFEKIWESQRRFYPELLTDELKHGAAGRRHYPVAPPQRQAGMSLLDAVGLHGLIFFQRRLRPVPRSVVGRCELEPKLRRCPRADRLAQRFRMLQEVNNLRYIEPQTGEECQLTSEQRALLLDKLSKKDKMEFGDIRKSLGFLETVKFNLESGHRKNLWGHLTDAALANKNIFGKDWYGKPEAERDAIVRDVLELDDRELLERAKLEWGLSQEAAERLASLQLPEGYLHLSRVALEKLVPHMERGLLLMTDDATPSAMSEAGYLRRDQRARQVRDELPTPPDVANPIVRAGLHEVRKVVNAIVREYGRPARINVELARDAKATAEERGRMSKQMRDRQAERDAAADKIREFGTHVNRDAIDRYLLWREQGECCAYCHRQISPNMLLGGEAEVDHILPYSRCLDDSFQNKVVACTACNRQKANQTPHEWLAVREPERYEKVASWARGKLNYQKFKRFTQKSLELDQFIARQLNDTRYISRVVLEYVCCLLPQPHDALGLKGQQTAALRRHWGLNTVLRRDDLDLKNREDHRHHAVDAIVVALTNHRRLQQLAAIERRGGTEATGEMMLDPWPGFRDDVEAIVNKINVSHRVRRKVAGALHEDTLYGSTSKGNEFAFRKTLDSLKLAMVPDIRDVAICTLVESRLREHGMETGRRKRGRADEDDA

SEQ ID NO: 9274 - protein, 967 aa, synthetic construct
  REGION 1..967: note = Synthetic
ANSIGWAVIDEPATRLLDAGVRVFPAGVDNFDTKKERSKSEDRRIARGMRRQTARRARRKRELKRALVDAGLYPGDAVEQALLECVDPYDLRRRGLDERLHLHEFGRALMHLSKRRGFLSNRKSDCAEDAEAKGMLAKINELAAAIQSAGCRTLGEYCSRERSAEPLVRLRGKHTRRDMFEHEFELLWAAQRQHYPDTLTDSLKYGSLGKRSAVRAPVAKQPGADLLSQFGLHGLIFFQRSMYWPKSVVGACELEPKRKRCPRADRMAQRFRLLQDVNNLRFLDPRTRQEERLSNRQRTLLLDKLSKVKQMTFDQIRKALGFVENAAFNLERGKRTKLLGMGVDATLADKKFFGAAWHKRNDAERDRIVRALVHADENEVRRLARDEWGVDEETTERLLAAELPDGYSALSVDAIERLLPHMERGLLYMTSDDTPCALTEAGYLRPDQREHRVAEFLPAPPDVANPVVRRALAELHKVANNIVRRYGKPTYIRIELARNASAGAEQRAAMSQRMRDREKERDRAADKIRELGVKVTRAAIDRHLLWEEQGGVCIYSGKCISAAQLFGAEAQIDHILPLSRTLDDSFANKVVCLVKPNAEKGKQTPFEWLAGRDADRFDQVCQRASSLPYPKRRRFSQKELDLDGFIERQLNDTRYINRLARQYLQCLVPAPHHVLCPKGIHTERLRHQWGLNTILRDDEISRKNRTDHRHHAIDAVVIALTDHSRLQKFAEAARDDLLGTAAVATSEPWQGFRSDVEGRVLAINVSHRVRRKIAGALHEDTLYGPTRREREFVVRKPLDALTPSMISDIRDPVVRKLVLARLEEHGITPGRGSKDRIPTDVWKDPLVLTSEKESRRSSRPAVIKKVRLLRREKTIQSIRGGSAFVKPGSVHHLCLFEWEENGKTVRDAEFVSMIDAVQRVQRHEPVIQRAHPRRPDALFLMSLSAGESVLIQIDGVERLFVFDTAAS

SEQ ID NO: 9275 - protein, 1019 aa, synthetic construct
  REGION 1..1019: note = Synthetic
MGGYILGLDLGANSIGWALLDESKPSLINAGVRVFPEGVDAFDTAKEKSRTQERRIKRGMRRQIARRARRKRGFRELLIAHGLFPADAPTQNTVLAENPYELRARGLDHPLTAHQFGRILLHLNARRGFLSNSKADKSKAKENSEMLKEISALAREIEESGHRTLGEHLASLGAKPGETPAHRLRGRHTRRDMLRREFELLWTAQQSHHPQLLTDDLKNQIDDPEGDETWWMRGAIFGQRKLYWPSSMIGRCEYEPKERRCLKAERIAQRYRLLSEVNNLKYIDPDSGKVSRLDDAQRVLLLDKLSQKREMTFDAIRKELGMLATVQFNLEKGERAKLKGHVVDYVMAKESPFGAKWWEMPEESKDRIVNMLADSRNSDDQIVREAIETWGLPEDEARALAGVNLPAGYLSLSRKAIEKLLPHMEKGQLLMTDDGTPCALTGAGYLRPDQRVRKVLERLPEPPDLPNPVVRQAMHEVRRVVNAIVREYGRPARIHVELARNIKMSPDDRDAYNKARSDREKLRSAAADAIRAEAPTARLSRELIDKYLLWQDQGGICVYCGNTISLRQLLSGDIDIDHILPRWRSLDDSFANKVVCFRAMNHEKGDRTPFEWLGGDPGRYEALKQRIRSLPWRKRTRFTQEALDTDEFSARQLVDTAYITRAAVDYLRCLVEQPHHVLGGKGSYTVELRHLWGLETILSELSDSPAWAAQADLRPGEKNRADHRHHAIDAIVVALTDQRRLQALSRLYKSGESGAEVLPWPDLRDTVKSVAAKINVSHRVQRRVSGALHDETLYGKTDKPGEFVVRKSLESLTPAMVEDIRDPTIRKLVIDRLTDFGLKWGRKSKDKIKKEVWKEPLRMLSGVPIKKVRLIKRDETIRPLRSNGDSAHVKPGSTHHVCIFQFAEGGKTKREAIFVTMLDAIERVKRREPIIQRTHPKRPEARFLMTLSPSEVILIKHGGRERVFRFETAAATSEQMWFRDVNFSGRSAQKNGQISKNPGTFDARKITVDPLGRIRWAND

SEQ ID NO: 9276 - protein, 714 aa, synthetic construct
  REGION 1..714: note = Synthetic
MALRTLGLDLGANSIGWSLVEDDKIVAAGVRVFPEGVDNFDTKKEKPKMEARRIARGMRRQIKRRARRKRQLRTLLTDVGLLPTDEQALNALSETDPYVLRREAISQELSLHQFGRLLVHLNQRRGFKSNRKSDRGRKSDDKGLLGEISQLAKDIQDTGARTLGEYLARVHNDPHARVRNRHTRRDMFEAEFDTCWNKQREFHPRELTDDLKKQIHRLMFFQRKMYWPKDVVGRCELEPKQPRAPRADRLAQRFRLLQEVNNLRYYDPQQRDEFPLSSEHRTLLLDKLSKKKEMTFDQIRKALGFLDTITFNLERGERKKLWGMPVDALLSDKKLFGNDWWKKSEAERNSIIRQVIDADDDEFPSLAEKWKLLPEQADALAGLDLPPGYANLSRMALEKLLPHMESGMLYMTDDATPSALVSAGYLRPDQRPRKVLEQLPEPPDVANPVVRQAMHEVRRVVNAIIREHGKPDRIHIELARNATMSGEERQKASKRRQENEDRRNTAAELIRGEGVKVSRDGIDRVLLWQEQGEICMYSGRPISITQLLHGEADIDHILPRSKCLDDSMQNKVVAFRKLNHEKGNRSPWEWLGESDPDRFSQILQCAERLNYPKRKRFTQKEIDTDKFVERQLNDTRYLSRAVSEYLRNLVAEPHLVLCPKGYHTAELRRHWGLNTVLRHDNDDVKNRDDHRHHSVDAIIIALTDHKRLQQLTRI

SEQ ID NO: 9277 - protein, 1037 aa, synthetic construct
  REGION 1..1037: note = Synthetic
MQKTVLGLDVGANSIGWALLDDSNGTIVAAGARVFPEGVENYDTRKEKPKMEARRIARGMRRQIRRRAARKNALRTLLAQVGLSPAEDSVDPYSLRRKALDVPLSPAEFGRVLIHLNQRRGFKSNRKTDRGRKADDKGMLGEINWVDQQRTASGSRTIGEMMDKVLRGEWHAEDELGRLQNAVRRIHTRREMLLHEFETIWDKQKSFDSPLAPLLTDQVKKALNNPAKDEDWMHKGLIFGQRNLYWPADAVGHCELEPKLKRCEKADRSAQRFRLLQEVNNLRFLDPTTGDEYALNVEQRTLLLDKLSRVDKMDFDRMRREMEFIDSITFNLERGNRKSIKGLPVDFQLAKKELFGKAWHDLPEERKNRIVRDLIDADDEKLMQLAVEQWGLSNEAAERLVHVELPEGYASLSRTALEKLLPPMERGLIYMSDDGTPCALSEAGYLRPDQRPRKRYDELPEPAPTANPVVRQALHEVRRVVNAIIREYGKPARIHIELARDATKSAEERAKSSKLRQENEDRRSAAADLIRAAVKEYNLSVKLTRDAIDRVLLWREQGEVCAYSGKVIGMRQLLLGEADIDHILPYSRCLDDSMANKVVAFRVENQAKGNQTPREWLEARHLKKYEQVQQFARRLPYNKRKRFTQKELELDGFVARQLNDTGYIATTVTDYLRGLVDEPHHVLCPKGTHTAELRRHWGLNTVLKELPDSPAWIEDADLRDGEKDRADHRHHAIDAIIVALTDQKRLQQISRINRQGGTTTTGEVLEAPWSHFRDSVTRAVAGIKVSHRVRRRVSGALHEDTHYGPVHEKTIDGSTVQRPGEFVVRKSIESLTPSMIEDIRDPTIREIVIARLKQHGVSFGRGIKGGIPKEVWREPLAMASGVPIRKVRIIKRDDTIRPIRGGSVYVKPGSMHHLCIFEWTEKGKKKRGAVFVSTLDAIERIKRHEPIISREHPDRPGARFIMSLSSGEIVQDLKGKGTGLFVFSTAASTSGQMWFLGHAEARPSSAATTYSVKATTMSPDARKVTIDPLGRIRWAND

SEQ ID NO: 9278 - protein, 1044 aa, synthetic construct
  REGION 1..1044: note = Synthetic
MDSPKRVKSQLVLGLDVGANSIGWALLDPGGATPIRAGVRVFPEGVDNYDTRKETSKSESRRVARGMRRQIMRRAARKVSLRRLLVVVGLAPDADAVDPYALRRKGLDSALTPGEFGRVLIHLNQRRGFKSNRKTDRARKADDEGTLGEINWVGEQVQASGSRTLGEMMDKVLRGEWKSDDDEAGKLQGAVRRVHTRREMFLDEFNQLWQKQKSFDSPLSSLLTDDLRKRLNNPVKDDDWMHKGLIFGQRNMYWSLDVVGFCELEPRLRRTERADRLAQRFRLLQEVNNLRYLDPESGNELPLNQEQRALLLDKLARVEKLDFDRMRKELGFLETISFNLERGKRKSIKGMPVDAALAHKDLFGKAWFERPESEKNEIVRDLIDLDDEALKARAVLEWRLSPESAEKLLSVELPEGHASLSRVALRNLLPSMERGLLYMTDDGTPCALTEAGYLRPDQRPHEQFDLLPEPPDIANPVVRQALHEVRRVVNAVVKEYGKPDRIHVELARDATKSAEERMNSSKIRQQNEDRRSGAAEAIREAIREHGLDIRLSRDAIDRFLLWKEQGETCIYSGKQIGIRQLLLGEADIDHILPYSKTLDDSMMNKVVAFRAENQAKGQRTPSEWLENQPDKFERVRQSARHLPYAKRIRFTQKQLELDSFVQRQLNDTRYIARAVKEYLRCLVAEPHHVLCPKGTHTAQLRRHWGLNTVLRELPDSPAWAGDDDLRDGEKDRSDHRHHAIDAIVVALTDQVRLQQLSRIARQGGTQATGEILPEPWPLFRKTAKDAVGSIKVSYRVQRRVSGALHEETLYGPVRDKLLDGSIKQRPDTFVVRKALGSLTPAMVEDIRDPAIKALVIARLKERNVAFGRKTAGGIPSGVWVPQLRMPSGTPVKKVRLLKKDETIRSIRGGTAYVKPGSMHHLCLFEWTERGTKKRGPVFVSMLDAIERIKRREAIIQRTHPDRPDARLIMSLSRGEIVQDVKGKGTGLFVFSTAASTQGQIYFFPLADARRASQKASFAVKANSMSRDARKVTVDPLGRIRWAND

SEQ ID NO: 9279 - protein, 758 aa, synthetic construct
  REGION 1..758: note = Synthetic
MGSTLGLDVGANSIGWFVVDTEAGNIIAAGVRVFPEGVDNFDTKKEKPKMEARRIARGMRRQIARRRARKQKLRRLLASAGLLPPSHEDQRLLDGLDPYPLRVRALSEPLSLHEFGRVIVHLNQRRGFKSNRKTDRGRKADDKGLLGEINQLAREIEQSGSRSLGELLARKHEDAHFRVRNRHTRRDMFEKEFEICWATQQAFHPDILTEELKKRIHRAIFFQRDMYWPASVIGRCELEPHDPRCPRADRLAQRFRLLQEVNNLRYYDPDAREERALREEQRAILLDKLSRVDKMDFDKIRKELGFIESISFNLERGNRKSIKGMPTDAAMAHKELFGKQWHELPEPRKNEIVRVLIDADDDKLPGLAVGWGLLPESADKLAAVELPDGYAALSRVALEKLLPYMERGLLYMTDDNTPCALTEAGYLRPDQMPHKALAELPKPPDIANPVVRQAMFELRKVVNAIIREHGKPDRIHIELARNATMSSEDRQKASKRRQENEDRRSAAADLIRTGGFKVSRDGIDRVLLWQEQHETCVYSGRAISLAQLLRGEADIDHILPYSRCLDDSMQNKVVAFRPLNHEKSNRTPREWLESDPQRYNQILRRASSLQYPKRKRFTQKELDLDKFVLRQLNDTRYIAREAARYLRQIVAQPHHVLCPKGSHTAELRRRWGLNGVLRSLPDSPAWSGDNELRDGEKDRSDHRHHTIDALVVALTDQSRLQQLTRVRRDGAGEVPDHVLPEPWPNFRESVIQAVAKII

SEQ ID NO: 9280 - protein, 790 aa, synthetic construct
  REGION 1..790: note = Synthetic
MSEPTLGLDVGANSIGWFLIDPDPQQIIASGVRVFPEGVDNFDTKKEKPKMEARRIARGMRRQIARRRARKRQLRILLAASGLLPTETDAQRALNLTDPYLLRRRALSEPLTPHAFGRMLVHLNQRRGFKSNRKSDRGRKADDKGLLGEINELAARLKEDNCQTLGQYLAKLHDDPHARVRNRHTRRDMFEDEFETCWEKQRAFHPAILTGELRTRIRKLIFFQRDMYWPASVVGRCELEPRQRRCSRADRLAQRFRLLQEVNNLRYFDPDAREERPLSPEQRALLLEKLSKVAKMDFDQIRKALGFIESIAFNLERGNRKSIKGMPTDYALANKELFGKKWHDLPESRKNEIVGKLIDADDDKLPELAREWGLPPESVEKLSAVDLPDGHAALSRLALEKLLPHMERGLLYMTDDDTPCALTEAGYLRPDQVPHRVLPALPEPPDIANPVVRQAMFELRKLVNSIIREYGKPARIHIELARNATMSSEDRQKASKRRQENEDLRDDAAELIRANQFKVSRDGIDRVLLWKEQHGNCVYSGRPISLAQLLQGEADVDHILPYSRCLDDSMQNKVVAFRSLNHEKGNHTPREWLEADPDRYNQVLQRASSLPYPKRKRFAQKELDLDKFVQRQLNDTRYITREAARYLRCIVEQPHFVLCPKGSHTAELRRHWGLNTVLRELPDSPAWTGDNDLRDGEKDRSDHRHHAIDALVVSLTDQSRLQQLARIRREGGTKGTGEILPDPWPDFRRSVIDAVSKIKVSHRVQRRVSGALHKDTIYGLVREKNIRGDL

SEQ ID NO: 9281 - protein, 855 aa, synthetic construct
  REGION 1..855: note = Synthetic
MSAEICLGLDVGANSIGWCLVDSGNGRIVATGVRVFPEGVDNFDTKKEKPKMEGRRVARGMRRQIARRAGRKRELRRLLTAKGLLPEGSGEQRSLDGVDPYELRRRAIRERLTLHESGRVLVHLNQRRGFKSNRKSDRGRKADDKGLLGEINALAAKLKEANCQTLGEYLAKEHNDPHVRVRNRHTKRDMFETEFEVCWERQRVHYPEILTEELKKQVHRVMFFQREMYWPKSVVGRCELEPKEPRAPRADRLAQRFRLLQEVNNLRYFDPDAREERGLNAEQRTLLLDKLSRVEKMDFERIRKALGFIDSIAFNLERGNRKALKGMPTDCALAKKELFGAGWYEFAESKKNKIVRELIDAEDDELGALAVKWGLPVECVERLGAVDFPDGYAALSRVALEKLVPQMERGLLYMTDDETPCALTEAGYLRPDQRERKVLAELPEPPEIANPVVRQAMFEIRKLVNAIIREHGKPGRIHIELARNATMSSEERQKASKRRQENEDLRDEAAEMIRGAGVRVSRDGIDRVILWREQGGKCVYSGRAISLTQLLQGEVDIDHILPRSRCLDDSMANKVVAFRELNHLKGNRTPREWLEGEPERYNQVLLHAAGLAYGKRKRFSQKELELDKFVLRQLNDTRYIAREAARYLRTIVDEPHHVLCPKGSHTAELRRHWGLNTVLRELADSPGWNADSDLRDGEKDRSDHRHHTIDALVVALTDQSRLQQLARIQREGGTETTGEVLDEPWANFRKSAKDGLAKIVVSHRVQRRVSGALHEETIYGPVREKNIKGELIRRAGEFVVRKPVESLTLAMIEDIRDKTIRALVIGRLKERHIEFGRGVKGSIGKEVWQPPLTMP

SEQ ID NO: 9282 - protein, 748 aa, synthetic construct
  REGION 1..748: note = Synthetic
QLDPYILRRRALAEQLAPHEFGRLLMHLNQRRGFKSNRKSGRGRKADDKGLLGEINELAANLKEDNCQTLGEYLAKLHDDPNCRVRNRHTRRDMFETEFEICWSKQQAFHPAILSDELKKGIRKVIFFQRNMYWPASVVGRCELEPHLPRCARADRLAQRFRLLQEVNNLRYFDPDAREERPLTSEQRTLLLDKLSRVERMDFERIGKELGFLESIAFNLERGNRKSIKGMPTDYALARKELFGKSWHEFPESKRNEIVRKLIDADDDKLPALAAEWGLPPESVEELGAVDFPEGYAALSRIALEKLLPYMERGLLYMTDDETPCALTEAGYLRPDQMPRKVLPVLPEPPDIANPVVRQAMFELRKLVNGIIREYGKPDRIHVELARNATMSSEERQKASKRRQENEDRRDEAAELIRSTNQFKVSRDGIDRVLLWQEQGGNCVYSGRPIGLTQLLQGEVEIDHILPRSRCLDDSMQNKVVAFRSLNHKKGNRTPREWLESDPDRYNQVLQHASQLPYPKRKRFTQKELDLDKFVLRQLNDTRYIAREAARYLRSIVEEPHHVLCPKGSHTAELRRHWGLNTVLREMPNSPAWGGENDLRDGEKDRSDHRHHAIDALVVALTDQSRLQQLARIQREGGTETTGEVLPEPWPTFRQSVIDAVAQINVSHRVQRRVSGALHKETIYGPVREKTVRGELVQRDGEFVVRKPLESLTLAMIEDIRDTAIRDLVVRRLKDRHIEFGRGSKGSI

SEQ ID NO: 9283 - protein, 804 aa, synthetic construct
  REGION 1..804: note = Synthetic
MDMGNMGELVLGLDIGANSIGWFLVNSGSAEIRAAGVRVFPEGVDNFDTKKEKPKMEARRIARGMRRQIGRRRARKRHLRILLGAAGLIPTDREAQRALDLVDPYVLRRRALSESLAPHEFGRLLIHLNQRRGFKSSRKSDRGRKADDKGLLGEINELAAKLREDNCQTLGEYLAQLHDDPNCRVRNRHTRRDMFEDEFEICWNKQRSFHPNILTEELKKRIHRLIFFQREMYWPASVVGRCELEPHQPRCARADRLAQRFRLLQEVNNLRYFDPDAREERPLTSEQRTLLLDKLSRVEKMDFDRIRKELGFLESIAFNLERGNRKSIKGMPTDYALARKELFGKGWHEFPESKKNEIVHKLIDADDEELPGLAAEWGLPPESVEELGAVDFPDGYAALSRVALQKLLPHMERGLLYMTDDETPCALTEAGYLRPDQVPRKVLTMLPEPPKIANPVVRQAMFELRKLVNAILREYCKECRLGRIHVELARNATMSSEDRQKASKRRQENEDRRDEAAELIRSTNQFKVSRDGIDRVLLWKEQGGNCVYSGRPISLTQLLQGEVDIDHILPRSRCLDDSMQNKVVAFRSLNHEKGNRTPREWLENDPDRYNQVLQRASQLPYPKRKRFTQKELDLDKFVLRQLNDTRYISREAARYLRQIVEQPHHVLCPKGSHTAELRRHWGLNTVLREMPDSPAWAGENDLRDGEKDRSDHRHHAIDALVVALTDQSRLQQLARIQREGGTETTGEVLPEPWPNFRQSVVDAVAKINVSHRVQRRVSGALHEDTIYGPVREKTVRGELVQRAG

SEQ ID NO: 9284 - protein, 1033 aa, synthetic construct
  REGION 1..1033: note = Synthetic
MKSGYTLGLDIGSNSIGWALLDNKNDDIIRTGVRIFPEEGMSGKVSKGGKQVKVSQRAMRGYTKRARRNRDRKTRRRDKLINILAQNGLLPLDFEERERLLLDMDVPKKERSLRPYRLRSEGLENPLTVYELGRVFFHLNQRRGYHSNRKSGDPSEDKKVGKEANELEKEIAAANCHTIGEYFYKIVSAKEKAEDEKDIERIRQRYTFRKTYRKEFDFLWQEQKKYHPKLLTEDLKKQIQQAIIYHQREPRYLKPKQCEYEPNSYTCKRANWTARQYVLLQNVNSIKIEVIGHEPKPLSEEQRAVALTLLSTNERVTFKNLKKHLGLGKDVEFNYEEDGKNKSMKGDSFLSDIRKLFGKEDWDEFPRKEQKSIVNAFAYFGDASLIEYLKERYKFESEKLDNALNVPIPEGRMPYSVLALKKINNYLAKGKLQHEALMLAYPDDNEKQIIRGFIKEVPEIENHVVLKALHEIKKLVNAIIKEHGVPNRIHVEMARDINKSPEEKDEIQRKIKGNEQENEKSWNELKNLIAENQLTVKPGKKTLLKYKLWKEAGKQCVFCGKYIHPRNLFEPDIQIEHILPRSRSFDNSFANKTIAHAKCNQIKDQYTPYEIYKDKPEEYRTLKKCLYDSNMPKHKRIRFLQETLDDTEALSRNLNDTRYANKAALKMLRQIGCLVLGRKAKLTSTIREYWNFNKILNPVENVKNRFDNRHHAVDAIIVGLIDQKLIEKLKLHFENPYIHKFELPDGFWEKAKKSIEEINVSYRPSYIEGHHFSDKLHKDNPLGLTDEVKGYFYEQKMVQLSQNAWICKEKLPYIQRKNLSEAIKTCGDIDVVIHESCKHIKDAIYAAAKKEGIDIADKEESIPTKVLANIYLIDKKGKKIPVRKIRSTVYKSSTIVFTDKKGKPYKAYPTGRNHHIEIVEKDGEKQGIIVTKFEAVRRHAEGKPVILRKHKSAKFIMSLSQNEMFMTEMDDGTFQLHRVEKISDSGIILRLHVYGGPCKDSDKVPLVLRKSPNTLNGYKVTVDPIGRVFPAKD

SEQ ID NO: 9285 - protein, 1048 aa, synthetic construct
  REGION 1..1048: note = Synthetic
MSLNYTLGIDLGASSIGWALVREKALPTSNENIVAGVRVFPAGTDSEKDVEKSKCIDRRVARGMRRQHQRKTQRRNRVTLVLVNAGLWPRNTQKQKELLLHPVMPDGTRDIYAVYNLRARALDETLTPYEIGRALIHLSQRRGFKSNRKIDNTDEKETGKVKEGIGRIRAAMEETSSRTLGEFFAKHIGVADIAARRGNYTDRKMIEDEFNQIWDAQAPHHPEIMTDKNREQIHEAIFFQRPFDKDSEDKIGHCVYIPEEKRARLGHRLVQRYRIWQEIANLRYNANDGQGEQSLSTENRRKIFEALDQVTKITFVKIKKIVGLPEDSVFNLETKGKRKELKGNESEAKLSRLFPEWDKLDEDERNARCEAILSLSDEELAAKARKEWGADDDKVAEILKVVLTAKTGSVSLAAVKRLLPHFEAGLDLTGALEKEGLGQSHIELEEGCNQLPLPDMDKLMITNPVVRTSLFQVRKIVNAIIAKYGKPKRIVVEFARDTKGSIEERNEKHTENRRLEKENESIRKRLIDEYKIVDPHKTDIVKYKLWKECDGICPYCGKELSPQEVFHTGEAQIEHIIPYSISFNDSYANKTLACHKCNLEKSARIPYQVWGQDEKRFGEIIGRVKLFQSEFRWTKVNKFEKKEIDETKAPERLLNDTRYMCRVVREFLQQLYSGTGSQRDQFVRVCTGSLTAKLRHQWGLNKILDVENNFKNRDDHRHHAVDAIVIALTNQNMVENLARWSQQRERRESPIFDAPKPFRAESRDPEQETQEFLRQAQQAIDKINVSHKPTRRVRGQLHNETHYGKIDENTYVVRKPLSALTANDAKSIRDPQIRELILNCLKQHGVDVNTKKSPENKVVQNALNAQPIYMTADGKPNGKAPQIKKVRVTVPLSKAIEFKNSDGEVYTYCDPDNNHHMEVFEFIDEKGKLKREARVVTLFEARRRVNAGESVVSRVHPTRPEAKLYTWFCKNDIVEVQDKDGSMKLCRIQKLSGSSEFSSKFNVYFRLHTAATIDDNGSLVHIQSCSPDKLVMKKKTVSPLGELSDDNG

SEQ ID NO: 9286 - protein, 837 aa, synthetic construct
  REGION 1..837: note = Synthetic
YLATLDPHESRRRERYTSRSQIEYEFNCIWDAQKQYHPNILTNELYADLYEAIFFQRPLKSMAHRIAKCSIEEDKRRASKASWYAHQFRILKETNNLRVLTPEGERFLDPHEREEVLHLLTTRTGRVKFSAIKKELGLSEHDSLNLEGGDRPGLDPNIVEASLKKIFKKRWEIEAELFTEEVWPLFIDEEQEEGVFEERATNDWRIGSEQIKAMKKIKAGSGHVRYSDKAMKKMMPFLIQGQNEYEARISAYGEETAERGSFALLPRLEGDGIANPVVTRTISETRKVVNALIRKYGKPNRIVIELARETKGSMADRAKKTKINRDNERERNAAKKWLLENHINPSRDNIRRYLLWIECNKECPFTGKTISVDNLFGNPPQFEVEHIFPYSRSCDNSWMNVILCAKRENASKKGNKTPVEAYGYRSERLDEIVARLRKMKAMPYAKKKRFTMKEIPEGFKNSQLTDTSYAARQVRERLQLLDVPVDTTKGHITAELRHFWGLNKVLQRQDEKEKKERRDHRHHAVDAIAIALTTNQIRNHLTTKFKSRENFSVPEPWKDFRKDVERSVSQIMVSFRPEHKLNAQFSKETNYGKRQLQAENERFVRRVPVEALTESMMERIIDKAVRKAVQEAYAKAKAESRGKPKPGWSCDLALQGKNGSKTPIKKARISEDFRYMIPLPDGEPTRFVQPENNHHAALYCDDTGPKRTYHLYVCSRFDAMQRHRKGESVVSPRHPDHANARIVFWVMKNDLVQYKDDDGAFYLYRVQKMSGPPSAQSGDVFLRLHTEALIDSKEFPFLLRQKAWSSKGLELHGELRFRKVLCDPLGRIDPVHDNPHN

SEQ ID NO: 9287 - protein, 1014 aa, synthetic construct
  REGION 1..1014: note = Synthetic
MKYVLGLDLGTNSCGWAVLAQDKDGFAESIVDSGSRIFTEAVERKTGNTKNKKRRECRGARRVKNRRKERKHALTSVLQEHGLLPEDNEQLLEILSLNPYALRKKGLDEELTLEEFARVLYHLNQRRGFKSNRKEGNDQKESKIVKVAITALEKEMEDAGSRTVGEHFAAIEERGERVRGQYTARAMFEHEFNLLWNKQTEYHTILDDAILRAQAYHAVFFQNPLRGCKHLVGKCTFEPSKKRASKGSWYFQQSRLLQTLNGLQATNIRTGEVIDIDENQRQLLLAVLTKTQKRTFDQIRKLLDLDSDWRFSLESEKRKYLNGNETEWNLRVALKDRYEALTPKVRDEIVHDLLFLEEDEPIKKHAKERWGFDDETADALAARSLASSYGSVSEKALKRIIVAQERGLDYYDALRAAGYCLKVQDNVRIQTLLPKPPKLTNTYVGRALNQTRKVVNALIKKYGTPTTIRLEMARELKKSPTVIGLIEKEQATNQRTNEYARAALKKDFGISDPSRDDLLKYKLWKECNKVCLYTGRSIPQHELFSAEWEIEHILPYSRSLDDGYMNKTLCARSENRTKANRTPHECYGHDKARWASVTGRIADVKLPWPKQRRFLQLHLSLDSCIERQLKDTQYIAREAREYLEYLVGRNKVQVTQGRTTAILRRFWGLNRILSHDADIKSRDDHRHHAVDAIVIALTCPATVRLISKLSKYHWQRKDQKLPTPWPSLIEDTRRAVNKIIVSHEPLRKIRGALHEETNYGILDLTNEKGQALFAVRKAVTRLTLNEVQKIADPVIKRIICDKLEAAGIDLQKKSITSADKRAIATVLEDVFIPRKDGTKTPVKRVRLHMYKSNMLQLTREGDSKPYRAVAYGSNHNAAIYIDDDDVWQVKITSMLDAAQRVRAGKPAVDRDSNLGSFHMALHPNETVKIDNSYYRVQKFDAAGAIVFRAIEAARLTDRATMVTGRAKGLQKKGVEKVEVTVLGEVHTQSISISTPTTSYGTTTEPLAVACSGPG

SEQ ID NO: 9288 - protein, 1009 aa, synthetic construct
  REGION 1..1009: note = Synthetic
QSSVRSRSCRNLILVGRKEMDDYILGLDLGTNSCGWAVLAQDKDGFAESIVDSGSRIFTEAVERKTGNTKNKKRRECRGARRVKNRRKERKHELTTVLQDHGLLPEDNEQLLEILSLNPYALRKRGLDEELTLEEFARVLYHLNQRRGFKSNRKEGNDKKESKIVKVAITALEKEMEDAGSRTVGEHFAAIEERGERVRGQYTARAMFEHEFNLLWDIQAAYHPVLDDAILRAQAYHAVFFQNPLRGCKHLVGKCTFEPSKKRASKGSWYFQQSRLLQTLNGLQATNIRTGEVIDIDENQRQLLLAVLTKTQKRTFDQIRKLLDLDSDWRFSLESEKRKYLNGNETEWNLRVALKDKYEALTPKVRDEIVHDLLFLEEDEPIKKHAKERWGFDDETADALAARSLAASYGSVSEKALKRIIVAQERGLDYYDALRAAGYCLKVQDNVRIQTLLPKPPKLTNTYVGRALNQTRKVVNALIKKYGTPTTIRLEMARELKKSPTVIGLIEKEQATNQRTNEYARAALKKDFGISDPSRDDLLKYKLWKECNKVCLYTGRSIPQHELFSAEWEIEHILPYSRSLDDGYMNKTLCARSENRTKANRTPHECYGHDKARWASVTGRIADVKLPWPKQRRFLQLHLSLDSCIERQLKDTQYIAREAREYLEYLVGRNKVQVTHGRTTAILRRFWGLNRILSHDADIKSRDDHRHHAVDAIVIALTCPATVRLISKLSKYHWQRKDQKLPTPWPSLVEDTRRAVNKIIVSHEPLRKIRGALHEETNYGILDLTNEKGQALFAVRKAVTRLTLNEVQKIADPVIKRIICDKLEAAGIDLQKKSITSADKRAIATVLEDVFIPRKDGTKTPVKRVRLHMYKSNMLQLTREGDSKPYRAVAYGSNHNAAIYIDDDDVWQVKVTSMLDAAQRVRAGKPAVDRDSNLGTFHMALHPNETVKIDNNYYRVQKFDAAGAIVFRAIEAARLTDRATMVTGRAKGLQKKGVEKVEVTVLGEVHTQS

SEQ ID NO: 9289 - protein, 1015 aa, synthetic construct
  REGION 1..1015: note = Synthetic
MRRILGLDLGVASIGWALVDEAELDNEKSKIVDEGTGARIFQSNQERAAAGSSKSKNESRREHRSARRMRDRTRRRKRKLKHILKRVQMISQEGQLDDWFKINPYEVRAKGLDEELSKEEFGRALYHMCQRRGFKSNRKDGDQNDGVIKEAIEHLNKAINDKGARTLGEFLYEEKEPPAKKRDRYTHRDQYLDEFEKLWSKQKSFKPEFYRKKLKRDIHDAIFFQRPVGSQSHLIGNCSLEPDKKRVPKGHLLFQKFRILKNVNNLRAFDENLHPIDITEKQKEQIKQKLFETKDLSFSKIRKMFGWNGNAQFNLEQGNAKKLLGHTTSARLSHKKAFGKRWQQFDDEMQDHIVDVLLHVEASKNVEGSKTVFELARERWDCTEEEADYLCTLELETGYGNYSSKALKKLIPELEKDLEESTAIKEAGYDIFTKKEGKYRRLPMPDDIRNPVVYHALIELRKVVNAIIREYGMPDTIRVELARDLKAGTKEREKIQKRQKKNKKINDKANEALKKAPFNVQNPTYEDRLWYKLWEECDGICPYTGNPIAKADFGTGKYQIEHIIPYSRSVDDSYMNKTLCEANENRKKSNRTPFEMYSHDEELWDKKLQYIRNLPYPKRRKFTKQEVELNDFVERQLNDTRYISKQASTFLKHLPADVEVVKGQTTATLRYCWSLNRILHPEGRNQKNRGDHRHHAIDAIVVALTSPGTLQRLSKAHVQEAAKHNKLSMDDPWDSFFDEVEQNVNNIIVSHRVHRKISGALHEESFYGPTDRQAKKDDKQWLVKRKDVHELSKGELGWDKNTQSFKKGSTKFIRDAKIRKIVQNKVMQKMEEGLSFNKAVASLEEDYPQLFHPKLTSVPIKKVRILYKKNKRNFFEFEDNGDGEVTRLAVYGKIHHIAIYNSKDDSNRKDREGVAVPMMEAARRDRNDEPIVLRDDPDMGSFIASFSQDEMIKNNEDDQIYRLKKKSTSKKMTFQKHKSSLKESEDPDILRRMPNTLDAQKITVSPIGKIKPAND

SEQ ID NO: 9290 - protein, 1068 aa, synthetic construct
  REGION 1..1068: note = Synthetic
MNCIKITYLNKKIKKEKILKKILGLDMGVASIGWSLIEYNQDDEGNIIDSGVRIFDQNLQRDNEAQKGESKNQQRTLHRGMRRQRDRKRRRKRGLYYSLKNVRMCPVKSENEEWNKWIDLNPYELRTKGLDEQLSLMEFGRVLYHLNQRRGFKSNRKVGKDKEDGAVATEISKIRAEIKKKGMRTLGEYLFSLQENHFDPPVSPDHDDYEFKRRIRNKYTHRDMYEEEFEMLWKKQIQFYPQILDDKFKAKISDDTIFFQRPLKSQKHLIGKCSLETDKKRIPKGHLLFQKFRILKTLNNLELMGEYGQRLDMTDEHRRIIKEKLEGAEQVSFAQLKKALGLNSNAKFNLETSDDSKLKGDTTSKKLSSKNAFGKEWYGLDEEFKNHVVDVLIHVEKPDVVEDLALTKWKRTKKQADHLKMLQLEKGYGSLSYKAIRKIMPLIKQGKRENEAIKEVYGEVKKPPKEDVFRLPILDPNDYRNPVVFGALVELRKVVNAILRKYGLPDVIRVELARDLKNSKKLREEITKKNNKLEKRNKEAIKALQKSPFNYQNPSRTDIIKYNLWIECNKTCPYTGRVINGEALAGGEFEIEHILPFSRTLDDSYVNKTLCESDFNRRKGNRTPYECVEAGLLSKEELEQRIKNNLPWRKRRKFTQKTIDTDEFIARQLNDTRYMSREASKYLKQLGSEEWPVDIQVTKGQTTSLLRHLWGLNSILSIENDEIKNRDDHRHHAVDAIVIALTSRSILKKLSDENKLIETENWMDEEESSVDRNRQIKDRASKRITNIPPWDTFWQDSQESVNQIVVSHKVSRKITGPLHQESFYGPTGEYYGKKKSEEFLVKRKPVFKLSLKEIGWDKKSLSFSKKGNAYIRDANIRKIVQDKALEKFKQLGDINKAIKSLETDPPLLVFMKKEGSNPILKVRVIEKMDLSIMHGFDEHEKKYTRYAYEFYKHHIVFYEKSSGDKDEEVIPMVEAARRVLEKEEIIQKDHPDYHRFIYSLASNETVLNLSDQKYYRVQRLFSDKRVMLRDINLAISETGKGRVFSRPKNLNLRKVRIDPIGQIFPAND

SEQ ID NO: 9291 - protein, 1055 aa, synthetic construct
  REGION 1..1055: note = Synthetic
LKKILGLDMGVASIGWSLIEYNQDDGGNIIDSGVRIFDQNLQRDNEAQKGESKNQQRTLHRGMRRQRDRKRRRKRGLYYSLKDVRMCPVKSENEEWNKWIDLNPYELRTKGLDEQLSLMEFGRVLYHLNQRRGFKSNRKVGKDKEDGAVATEISKIRAEMKKKGMRTLGEYLFSLQENHFNPPVSPDHDDYEFKKRIRNKYTDRNMYEEEFELLWEKQTQFYPQILSEKFKAKLSDDTIFFQRPLKSQKHLIGKCSLESDKKKIPKGHLLFQKFRIAKTLNNLELMGEYGQNLDMSDEHKRIIREKLERSEHVSFSQLKKALGLNSNAKFNLETSDDSKLKGDTTSKKLSSKNAFGKEWYGLDEEFKNHVVDVLIHVEKPDVVEDLALNKWGRTKEQANHLKMLQLEKGYGNFSYKAIRKIMPLIKQGKRENEAIKEVYGEVKKLPKEDVFELPLLNPNDYRNPVVFGAMVELRKVVNAILRKYGLPDIIRVELARDLKNSKKLRDEITKKNNKLEKRNKEAIKALKQSPFNYQNPSRTDIIKYNLWIECNKTCPYTGRVINGEALDSGEFEIEHILPFSRTLDDSYANKTLCESDFNRRKGNRTPYECIEAGLLREEELEQRIKNNLPWRKRRKFTQKTIDTDEFIARQLNDTRYMSREASKYLKQLGSEEWPVDIQVTKGQTTSLLRHLWGLNSILSIENDEIKNRDDHRHHAVDAIVIALTSRSILKKLSDENKLIETENWMDEEESSVDRNRQIKDRASKRITNTPPWDTFWQDSQESVNQIIVSHKVSRKISGAFHEETYYGPTEESTSKKDYIKYLVVRKKVESLSEKELGWNSKTQTFDKEGKVFIRDEHIKKIVRDKIWEKYKKIGDIKKAIAALETDPPKLFHKNGKDFNPIHKVRLLMEKDLSKMNEFEDEPKTPTRYALYGNNHHIAIYEYTDKNGNKKQTGEVIPTMEAARRVLDKEPIIMREHPEYDRFLFSLSTNEMVQDAEDNIFRVQKISSDTQMTFRLNNIALKGASDPGVLRKNPSSVASLKKVRIDPIGQIFPAND

SEQ ID NO: 9292 - protein, 1055 aa, synthetic construct
  REGION 1..1055: note = Synthetic
LKKILGLDMGVASIGWSLIEYNQDDEGNIIDSGVRIFDQNLQRDNEAQKGESKNQQRTLHRGMRRQRDRKRRRKRGLYYSLKGVRMCPVKSENEEWNKWIDLNPYELRTKGLDEQLSLMEFGRVLYHLNQRRGFKSNRKVGKDSEDGAVATEISKIRAEMKKKGMRTLGEYLFSLQENHFDPPVSPNHDDYEFKRRIRNKYTHRNMYEEEFELLWEKQTQFYPQTLTEKFKAKLSDDTIFFQRPLKSQKHLIGKCSLEPDKKKIPKGHLLFQKFRIEKTLNNLELMGEYGQSLDMTDEHKKIIREKLERSDHVSFSQLKKDLGFNSNAKFNLETSDDSKLKGDTTSKKLSSKNAFGKEWYGLDEEFKNHVVDVLIHVEKPDVVEDLALNKWGRTKEQANHLKMLQLEKGYGNFSYKVIRKIMPLIKEGKRENSAIKEVYGEVKKTPKEDVFQLPLLDPKDYRNPVVFGAMVELRKVVNAVLRKHGLPDIIRVELARDLKNSKKLRDEITKKNNKLEKRNNEAIKALKQSPFNYQNPSRTDIIKYNLWIECNKTCPYTGRVINGEALDRGEFEIEHILPFSRTLDDSYANKTLCESDFNRRKGNRTPYECVEAGLLSKEELEQRIKNNLPWRKRRKFTQKTIDTDEFIARQLNDTRYMSREASKYLKQLGSEEWPVVIQVTKGQTTSLLRHLWGLNSILSIENDEIKNRDDHRHHAVDAIVIALTSRSILKKLSDENKLIETENWMDEEESSVDRNRQIKDRASKRITNTPPWDTFWQDSQESVNQIIVSHKVSRKISGAFHEETYYGSTEESSSKKDHIKYLVVRKRVEALSEKELGWNSKTQTFDKEGKVFIRDEHIKKIVRDKIWKKYKETGDIKKAIAALETDPPKLFHKNGKDFNLIHKVRLLMEKDLSKMNEFEDEPKTPTRYALYGNNHHIAIYEYTDKNGNKKQTGEVIPTMEAARRVLDKEPIIMRDHPDYDRFLFSLSTNEMVQDAEDNIFRVQKISSDTQMTFRLNNIALKGASDPGVLRKNPSSVASLKKVRIDPIGQIFPAND

SEQ ID NO: 9293 - protein, 892 aa, synthetic construct
  REGION 1..892: note = Synthetic
LTEKFKAKLSDDTIFFQRPLKSQKHLIGKCSLEPDKKKIPKGHLLFQKFRIEKTLNNLELMGEYGQSLDMTDEHKKIIREKLERSDHVSFSQLKKDLGFNSNAKFNLETSDDSKLKGDTTSKKLSSKNAFGKEWYGLDEEFKNHVVDVLIHVEKPDVVEDLALNKWGRTKEQANHLKMLQLEKGYGNFSYKVIRKIMPLIKEGKRENSAIKEVYGEVKKTPKEDVFQLPLLDPKDYRNPVVFGAMVELRKVVNAVLRKHGLPDIIRVELARDLKNSKKLRDEITKKNNKLEKRNNEAIKALKQSPFNYQNPSRTDIIKYNLWIECNKTCPYTGRVINGEALDRGEFEIEHILPFSRTLDDSYANKTLCESDFNRRKGNRTPYECVEAGLLSKEELEQRIKNNLPWRKRRKFTQKTIDTDEFIARQLNDTRYMSREASKYLKQLGSEEWPVVIQVTKGQTTSLLRHLWGLNSILSIENDEIKNRDDHRHHAVDAIVIALTSRSILKKLSDENKLIETENWMDEEESSVDRNRQIKDRASKRITNTPPWDTFWQDSQESVNQIIVSHKVSRKISGAFHEETYYGSTEESSSKKDHIKYLVVRKRVEALSEKELGWNSKTQTFDKEGKVFIRDEHIKKIVRDKIWKKYKETGDIKKAIAALETDPPKLFHKNGKDFNLIHKVRLLMEKDLSKMNEFEDEPKTPTRYALYGNNHHIAIYEYTDKNGNKKQTGEVIPTMEAARRVLDKEPIIMRDHPDYDRFLFSLSTNEMVQDAEANAEDDKKFEELIQARNAADTLIHGCKKTLEESADKVEAEEKESIESAITDLEEILKSEDKDKIEEKTKALADASSSLAQRLYAEQQQNSQENQDNQETNEADSNDEVVDADFEEVKEEKK

SEQ ID NO: 9294 - protein, 864 aa, synthetic construct
  REGION 1..864: note = Synthetic
LKKILGLDMGVASIGWSLIEYNQDDEGNIIDSGVRIFDQNLQRDNEAQKGESKNQQRTLHRGMRRQRDRKRRRKRGLYYSLKGVRMCPVKSENEEWNKWIDLNPYELRTKGLDEQLSLMEFGRVLYHLNQRRGFKSNRKVGKDSEDGAVATEISKIRAEMKKKGMRTLGEYLFSLQENHFDPPVSPNHDDYEFKRRIRNKYTHRNMYEEEFELLWEKQTQFYPQTLTEKFKAKLSDDTIFFQRPLKSQKHLIGKCSLEPDKKKIPKGHLLFQKFRIEKTLNNLELMGEYGQSLDMTDEHKKIIREKLERSDHVSFSQLKKDLGFNSNAKFNLETSDDSKLKGDTTSKKLSSKNAFGKEWYGLDEEFKNHVVDVLIHVEKPDVVEDLALNKWGRTKEQANHLKMLQLEKGYGNFSYKVIRKIMPLIKEGKRENSAIKEVYGEVKKTPKEDVFQLPLLDPKDYRNPVVFGAMVELRKVVNAVLRKHGLPDIIRVELARDLKNSKKLRDEITKKNNKLEKRNNEAIKALKQSPFNYQNPSRTDIIKYNLWIECNKTCPYTGRVINGEALDRGEFEIEHILPFSRTLDDSYANKTLCESDFNRRKGNRTPYECVEAGLLSKEELEQRIKNNLPWRKRRKFTQKTIDTDEFIARQLNDTRYMSREASKYLKQLGSEEWPVVIQVTKGQTTSLLRHLWGLNSILSIENDEIKNRDDHRHHAVDAIVIALTSRSILKKLSDENKLIETENWMDEEESSVDRNRQIKDRASKRITNTPPWDTFWQDSQESVNQIIVSHKVSRKISGAFHEETYYGSTEESSSKKDHIKYLVVRKRVEALSEKELGWNSKTQTFDKEGKVFIRDEHIKKIVRD

SEQ ID NO: 9295 - protein, 1060 aa, synthetic construct
  REGION 1..1060: note = Synthetic
IKKEKILKKILGLDMGVASIGWSLIEYNQDDEGNIIDSGVRIFDQNLQRDNEAQKGESKNQQRTLHRGMRRQRDRKRRRKRGLYYSLKGVRMCPVKSENEEWNKWIDLNPYELRTKGLDEQLSLMEFGRVLYHLNQRRGFKSNRKVGKDSEDGAVATEISKIRAEMKKKGMRTLGEYLFSLQENHFDPPVSPNHDDYEFKRRIRNKYTHRNMYEEEFELLWEKQTQFYPQTLTEKFKAKLSDDTIFFQRPLKSQKHLIGKCSLEPDKKKIPKGHLLFQKFRIEKTLNNLELMGEYGQSLDMTDEHKKIIREKLERSDHVSFSQLKKDLGFNSNAKFNLETSDDSKLKGDTTSKKLSSKNAFGKEWYGLDEEFKNHVVDVLIHVEKPDVVEDLALNKWGRTKEQANHLKMLQLEKGYGNFSYKVIRKIMPLIKEGKRENSAIKEVYGEVKKTPKEDVFQLPLLDPKDYRNPVVFGAMVELRKVVNAVLRKHGLPDIIRVELARDLKNSKKLRDEITKKNNKLEKRNNEAIKALKQSPFNYQNPSRTDIIKYNLWIECNKTCPYTGRVINGEALDRGEFEIEHILPFSRTLDDSYANKTLCESDFNRRKGNRTPYECVEAGLLSKEELEQRIKNNLPWRKRRKFTQKTIDTDEFIARQLNDTRYMSREASKYLKQLGSEEWPVVIQVTKGQTTSLLRHLWGLNSILSIENDEIKNRDDHRHHAVDAIVIALTSRSILKKLSDENKLIETENWMDEEESSVDRNRQIKDRASKRITNTPPWDTFWQDSQESVNQIIVSHKVSRKISGAFHEETYYGSTEESSSKKDHIKYLVVRKRVEALSEKELGWNSKTQTFDKEGKVFIRDEHIKKIVRDKIWKKYKETGDIKKAIAALETDPPKLFHKNGKDFNLIHKVRLLMEKDLSKMNEFEDEPKTPTRYALYGNNHHIAIYEYTDKNGNKKQTGEVIPTMEAARRVLDKESIIMREHAEYDRFLFSLSTNEMVQDAEGNVYRVQKLTSTGEITFRSHNIALKGPFDPGVIRKMGTTVDFKKIRIDPIGQIFPAND

SEQ ID NO: 9296 - protein, 1054 aa, synthetic construct; identical to SEQ ID NO: 7313
  REGION 1..1054: note = Synthetic

SEQ ID NO: 9297 - protein, 1024 aa, synthetic construct; identical to SEQ ID NO: 7315
  REGION 1..1024: note = Synthetic

SEQ ID NO: 9298 - protein, 877 aa, synthetic construct
  REGION 1..877: note = Synthetic
LKIQQLMEQYQARTFGEYCFKILENHRIYEKTPLDDDWRIRDNYTQREMFKKEFEQMWSAQQRFNAPLYTDSLKAEIFECLFFQRKMKSQAHLIGKCPLEKNKRRIAKAHLLFQEFRILKNVNNLALADENGIPITLSLEDKRSLFDVMNKRDKVTFKSLKTTLVNKGVIANTNVVFNLEVGGRKDIEGNRTNKKLSNEKAFGEAWYDMDSELKDYIVYVLVHFDDPYKVKEKALNEWNRTDEQASYLSYLTLEKNYAGFSEKAIKKLIPFLKEGMEESAAIKAAGYEIFSQKQGNHTRLPMPPDIKNAVVYHALIELRKVINGIIRVYGMPDIIRVELTRDIKAGYERRQKMTKNMRDLEKRNVKAKKALQHAPFNRQEPTFNDLLWYNLWEECERICPYTEKQIPAEAFNTGEFQVEHIIPFSRSLDDSFANKTLCDADFNRRKGNRTPWECMQAGLITEDELIQRTRQLPWNKKRKFVQKATDENSFINRQLSDTRYISREASSYLKQLACEQVEVVKGQSTSLLRHVWGLNGVLNTENEEMKTRDDHRHHAVDAIVVALTSRSILKRLSDENTKLSSEEWKSIEESGKEQYEELKKRIDGRIWLSEPWPYFRYTVEQSINDITVSHRINRKISGALHEETFYGPTNVSAPRKKVMMVVRKPVHALSKKDVGLIRDKGIQQIVNRHIQAIIDEGQTFENAIKSLETNPPYIVSDKAKVPIRKVRLLMEKEPSIMHAFTNGENKVFKHALYGNNHHIAIYSTIDKKGAPKQVGFVVPMIEVARRVKDGEPMVDRTYLPNHTFLYSLSKNEMIINHEDEEIYRVQKLASNGQIVFRRTSVALKGQNDPGVLRKNPGTLKATKIKISPIGEVFPASD

SEQ ID NO: 9299 - protein, 1025 aa, synthetic construct
  REGION 1..1025: note = Synthetic
MTKILGLDLGVASIGWSLIEQFDEGGQILKSGVRIFQSNSERALAAPGESAKSDRGTKRSVRRQRDRRSRRKQKLYNLLFKNDLAPKREDSEKWISLDPYQIRASALDNKVSLAEFGRALYHLNQHRGYKSNRKDGEDKDGAVSQGIKKINELMKQYDARTYGEYCFKISGNHHDESKTPNDDDWRIRNNYTHRDMFISEFKFLWEAQKKHHPTVLTEELKNELFDTIFFQRKMKSQAHLIGKCPLEKNKKRIPKAHLLFQEFRIRKELNNLSLADENGLHITLKQEDKEKLFAFLNKRSDATFSALKTVLIKNNVIANSNVTFNLERGDRKNLRGNTTNHRLSKPKAFGDDWFTLERELQDYIVYVLIHFDDPQKVYEKAKNEWGRSDEQAKTLSHLRLESDYGNFSEKAIKKLLPLLREGKEESTAIKEAGYDLFEKKQGNLNKLPMPPEIKNSVVYHALIELRKVINGIIRVYGMPDIIRVELTRDIKAGYDRRQKMTKKMRDLEKRNQKAREALKKAPFECQEPTYSDILWYNLWNECNRTCPYTNRSIPAESFNFGEFQIEHIIPFSRSLDDSFANKTLCDADFNRKKGNRTPWECVQAGLIKEDDLLQQIRELPWNKRKKFIQKSVDQSSFISRQLNDTRYISKEASSYLKQLACKDVEVVKGQTTSLLRHVWGLNSVLNPENEEMKSRDDHRHHAVDAIVVALTSRSMLKRMSDENKKLTEDEWKTLEETGKAQYAELKKRMDGRIWLSHPWPSFRKDVERSVNDITVSHRVKRKISGAFHEETFYGLTKEKAPKNKVMMVVRKPIHALSAKELKLIRDRGIRQIVNETVQKRVDAGLSQANAIKSLEADPPFIISEKARVPIRKVRLLMEKSPEIMHSFSDDDGNEFKHALYGNNHHIAIYETLDKTGEAKQVGFVVPAMEAARRAMDEEPIIDKTFRAHDHTFKFTLSINDMIINHEDEKIYRVQKINSKGEITFRKSEVALKGAFDPGVYRKMPSTLKASKIKISPIGEIFPAND

SEQ ID NO: 9300 - protein, 1025 aa, synthetic construct
  REGION 1..1025: note = Synthetic
MTKILGLDLGVASIGWSLIEQHENGGEILKSGVRIFQANNERALAAPGESAKSDRGTKRSIRRQRDRRSRRKQKLYNLFFKNGLAPERGESEDWVSLNPYLIRAKALDEKVTLQELGRAFYHLNQHRGYKSNRKDGEDKDGAVSKGIKKIETLMNEYDARTYGEYCFKIIENHRLENKTPSDDDWRIRNNYTHRNMFIDEFDKIWEAQQNHHPEILTESLRDEIYQTIFYQRKMKSQAHLIGKCPLEKNKKRIPKAHLLFQEFRIRKELNNLTMADENGMPITLTVKDKEYLFDYLNTRKEASFKALKSELIKNDVIANSNVSFNLERGDRKNLKGNTTNYRLSNNKAFGDDWYKLDRELQDYIVYVLIHFDDPQKVYEKAMKEWGRTHEQAKTLSHLRLESDYGSFSEKAVKKLLPHLKEGKLESTAVVEAGYDLFEKKQGQLTKLPMPPEIKNSVVYHALIELRKVINGIIRVYGMPDKIRVELTRDIKAGYDRRQKMTKKMRELEKKNQKAREALKTAPYNRQEPTYNDILWYNLREECKGVCPYTDKSIPAEAFNTGEFQIEHIIPFSRSLDDSFANKTLCDADFNRKKGNRTPWECVEAGLISEDDLVQRIRKLPWNKRKKFIQKSVDQSQFISRQLNDTRYISKEASSYLKQLACEDVEVVKGQTTSLLRHIWGLNGVLNPENDEMKSRDDHRHHAVDAIVVALTSRSLLKRLSDENKKLGEDEWKTLEETGREQYSELKKRMDGRIWLSHPWPSFRKDVERSINDITVSHRVKRKISGALHEETFYGGTDEKAPKNKVKMVVRKPVHALSNKELKLIRDAGIRRIVNETIQKRVEAGMTQVNAIKSLEADPPYIISDKAKVPIRKVRLLMEKNPEIMHSFSNEKGELFKHALYGNNHHIAIYETTDKKGETKQVGFVVPTMEAARRVKDGDPIIDKSYRSHDHTFKYSLGINDMIINHDDSEIYRLQYIESIGKMGFRKTNVALKKPSDPGIIRKMPGTLKATKIKISPIGEIFPAND

SEQ ID NO: 9301 - protein, 1039 aa, synthetic construct; identical to SEQ ID NO: 7314
  REGION 1..1039: note = Synthetic

SEQ ID NO: 9302 - protein, 1026 aa, synthetic construct
  REGION 1..1026: note = Synthetic
MKKILGLDLGVASIGWGLVEENGESGKILKSGVRIFQSNEKRADAAPGESSNADRRTKRSVRRQRDRRGRRKDKLYNFLKKNDLALKKIKWDEWVSINPYEIRSHALHEKVSLHEFGRALYHLNQRRGYKSNRKTGNDKEGPVTEGISKIKEYMAKYNAETLGDYFYKILENHRDSETEHDDFDWRIRNNYTHRTMYKEEFEKLWESQSKYHSVLTDDLKDEIQRIIFFQRKLKNQSHLIGKCPLENDKKRIAKGHLLYQEFRIQKNLNNLSLSDENGIHIGLSNEDLSSFKEILEKKDKVTWSTLKKDLIKRGQISNQNVAFNLERGDRKHIEGNRTNRSLSHKKAFGEQWFELEKDFKNHVVDVLLHVDKTEIVKELALKKWDRSEEQAKYLSNLTLEKGYAGYSEKAIKKLLPYLYKGKQESSAIKDAGYDLFEPNSGSKNQLPMPNTDIKNPVVYHALIELRKVLNGIIREYGMPDVIRVELARDLKAGYEHRQKMNKKMRELEKKNDKARKALQKAPFDIQYPNYSDIIWYNLWEECDQTCPYTGKVIPAEAFNSGEYQVEHIIPFSKSLDNSFANKTLCEADFNRKKGNRTPWECVEADILDEDKMLQRIRNLPWNKRNKFTQKEIDQDKFMNRQLNDTRYISREASSFLKELSCKSVEVVKGQTTSLLRHVWGLNSVLNKEDDDMKNRDDHRHHAVDAIVVALTNRSTLKRLSDENKSITSAEWKEIDESEQEVYQEMKRRIGERIGLGEPWVTFRNDVEMSINNITVSHRVDRKISGALHEETYYGPTLEKASKKKEMMVVRKPVHQLSKKELGLIRDDTIREIVNDEIKKRIEEGKSQDIAVKSFESEPPYIVSSKAKVPIKKVRLLMEKEPDKMHAFEDNEEDEITRYALYGNNHHIAIYKTVDEKGDSKQVGIVVPTMEAARRVKDAEPIVMRDYRPDYEFLYSLSNNDIIINQEDGEIYRVQKISSDGQITFRKNEVSMKGASDPGVLRKNPSSLNIQKVKVSPSGEIFLKAHD

SEQ ID NO: 9303 - protein, 1027 aa, synthetic construct
  REGION 1..1027: note = Synthetic
MKKILGLDLGVASIGWGLIETGRNNENGKILKSGVRIFQGNEQRADAAPGESSNADRRTKRSIRRQRDRRTRRKINLYVTLKQRGLAPNKSEWDEWVSINPYTIRAKALDEKVSLHELGRALYHLNQRRGYKSNRKAGSDKEGAVKEGISKVRKQMAKHSARTIGEYFYEIYNNHQQDDVEHDDFDWRIRDKYTHRKMFKEEFNALWEAQTEYHNTLSEKLGEEIKKIIFHQRKMKSQSHLIGKCELETDKKRIAKAHLLFQEFRVLKNINNLSVSDENGLHIKLTDNDRKKFKEIFDRKDKVSWSQLKTALIKSGSISNKNVIFNLERGGRKNIEGNRSNAALSHKKAFADEWFEMDDEFKNHVVDVLIHVDKPEVVKELALIKWNRTEEQAEYITHKLSLEQRYGNFSEKAIKKILPYLEKGTEENTAIKEAGYSLFEQNPGKMNQLPMPDQAIKNPVVYHALIELRKVVNGIIREYGMPDVIRVELARDLKAGYDTRQKMTKQMRELEKKNDKAYKSLQKAPFDVQYPSYNDIIWYNLWEECEKMCPYTGKSIPAEAFNSGEFQIEHILPFSSSLDNSYANKTLCEADFNRKKGNRTPWKCVEAGLMDEDTMLQRIRNLPWNKRNKFTQKEIDEDIFLNRQLNDTRYISKEASSYLKHLSCESVEVVKGQTTSLLRHLWGLNSVLNKEDPEMKNRNDHRHHAVDAIVVAFTNRSTLKRLSDENKRIGTAEWMDADESGRATNEEMKRRLGGRIALSEPWLTFRNDVEASINNITVSHRVNRKVSGALHEETYYGPTVEPAPKNKQMMVVRKPVHQLSKKDLTLIRDATIRKIVNEEVQKRLDKGESQTNAIASLEADPPYIVSSKAKVPIKKVRLLMKKDPQIMHFFENKDGKESRAALYGNNHHIAIYETTDENEEKKQVGIVVPMMEAARRVKDGESVVMKNFRPDHSFLFSLAINDMIFNNEHEEIYRVQKIESSGKITFRHQHVAMKGPADPGVLRKMPSTLEASKIKISPIGEIFPAND

SEQ ID NO: 9304 - protein, 1027 aa, synthetic construct
  REGION 1..1027: note = Synthetic
MKKVLGLDLGVASIGWSLIETNKENENGKILKSGVRIFQGNEQRADAAPGESSNADRRTKRSVRRQRDRRTRRKINLYVTLKQKGLAPNKTEWDKWVSINPYTIRAKALDEKVSLHEFGRALYHLNQRRGYKSNRKAGSDKEGAVKEGISKVRNHMAKHNARTIGEYFYEIYDNHLQGDVEHDDFDWRIRDKYTHRKMFKEEFDALWKAQSAYHDVLTEKLGKEIKKIIFHQRKMKSQSHLIGNCELETDKKRIAKAHLLFQEFRVLKNINNLSISDENGFQIKLTDDDRSLFKEIFDKKDKVSWSQLKTTLIKSGTIGNKNAIFNLERGGRKNIEGNRTNAALSNDNAFGDEWFDLEEDFKNHVVDVLIHVDKPEVVKDLALNKWDRTEKQAEYITNKLSLEQRYGSFSEKAIKKLLPYLEKGMEESTAIKEAGYSLFEQNPGKMNQLPMPDQTIKNPVVYHALIELRKVVNGIIREYGMPDVIRVELARDLKAGYEHRQKMTKRMRELEKKNDKAYKALQQAPFDIQYPGYNDIIWYNLWEECEKTCPYTGKSIPAEAFNSGEFQIEHILPFSRSLDNSYANKTLCEADFNRKKGNRTPWECVEAGLMEEDIMLQRIRNLPWNKRNKFTQKEIDEDKFLNRQLSDTRYISKEASAYLKHLSCEGVEVVKGQTTSLLRHLWGLNSVLNKEDPEMKNRDDHRHHAVDAIVVAFTNRSTLKRLSDENKQIGAAEWMNDDESGRAKNDEMKRRLGGRIDLSEPWLTFRNDVEASINNITVSHRVNRKVSGALHEETYYGPTDEPAPKNKEMMVVRKPVHQLSKKDLTLIRDETIRQIVNEEVQKRIDKGESQANAIASLEADPPYIVSPKAKVPIKKVRLLMKKDPQIMHFFKNKDGEENRAALYGNNHHIAIYETKDNNGDKKQVGIVVPMMEAARRVKDGEPIVMKDYRPDHSFLYSLALNDSVVDNESGDILRVQKIASTGQITFRLHTVALKGQSDPGVLRKNPSSLNVEKIKISPSGEIFPAND

SEQ ID NO: 9305 - protein, 1013 aa, synthetic construct
  REGION 1..1013: note = Synthetic
MKKVLGLDLGVASIGWSLIETNKENENGKILKSGVRIFQGNEQRADAAPGESSNADRRTKRSVRRQRDRRTRRKINLYVTLKQKGLAPNKTEWDKWVSINPYTIRAKALDEKVSLHEFGRALYHLNQRRGYKSNRKAGSDKEGAVKEGISKVRNHMAKHNARTIGEYFYEIYDNHLQGDVEHDDFDWRIRDKYTHRKMFKEEFDALWKAQSAYHDVLTEKLGKEIKKIIFHQRKMKSQSHLIGNCELETDKKRIAKAHLLFQEFRVLKNINNLSISDENGFQIKLTDDDRSLFKEIFDKKDKVSWSQLKTTLIKSGTIGNKNAIFNLERGGRKNIEGNRTNAALSNDNAFGDEWFDLEEDFKNHVVDVLIHVDKPEVVKDLALNKWDRTEKQAEYITNKLSLEQRYGSFSEKAIKKLLPYLEKGMEESTAIKEAGYSLFEQNPGKMNQLPMPDQTIKNPVVYHALIELRKVVNGIIREYGMPDVIRVELARDLKAGYEHRQKMTKRMRELEKKNDKAYKALQQAPFDIQYPGYNDIIWYNLWEECEKTCPYTGKSIPAEAFNSGEFQIEHILPFSRSLDNSYANKTLCEADFNRKKGNRTPWECVEAGLMEEDIMLQRIRNLPWNKRNKFTQKEIDEDKFLNRQLSDTRYISKEASAYLKHLSCEGVEVVKGQTTSLLRHLWGLNSVLNKEDPEMKNRDDHRHHAVDAIVVAFTNRSTLKRLSDENKQIGAAEWMNDDESGRAKNDEMKRRLGGRIDLSEPWLTFRNDVEASINNITVSHRVNRKVSGALHEETYYGPTDEPAPKNKEMMVVRKPVHQLSKKDLTLIRDETIRQIVNEEVQKRIDKGESQANAIASLEADPPYIVSPKAKVPIKKVRLLMKKDPQIMHFFKNKDGEENRAALYGNNHHIAIYETKDNNGDKKQVGIVVPMMEAARRVKDGEPIVMKDYRPDHSFLYSLALNDSVVDNESGDILRVQKIASTGQITFRLHTVALKGQSDPGVLRNLRIQKIMSV

SEQ ID NO: 9306 - protein, 1036 aa, synthetic construct; identical to SEQ ID NO: 6212
  REGION 1..1036: note = Synthetic

SEQ ID NO: 9307 - protein, 1040 aa, synthetic construct
  REGION 1..1040: note = Synthetic
MAKVLGLDIGSNSIGWCLVEDEVQEIVDTGVRIFQEGVAKQDEREEASRNAKRREARMMRRQIDRRRRRKRVVRNILIRYGLLPKNEGELVALMYGLSNPHALRSRALDEPLSAFELGRTLYHLNQRRGFKSNRKAQAEEEDSGTIYDGTKDGTKPGILVLREALQNGFRTIGEYFASLDTSTTRIRERLTERAMYEAEFDAIWTSQHRFHSDILTDEFRKELHRAIFYQRPLKSQKHRLGKCRFEPLKPKAPKSAPLSQRFRMLQSVNNLRIIGETRVDDDATMLTEEERNALIRHLTDVGDADFSKSTHVKDIFGFKKTDAYRFSLDKIKGLTTERAIRQAFGSDHYKRLSVEEIDKIWHALYYFEDQQKLIAHLREKWGLMLQGAEKLAKSRMEDGFMSVSTRFIRRVIPYLEQGLVYSDACVAAGYDHSSMNIVPGSRDRVNGIDTGTIRNPIVIRSMSETRKLVNAILAEYGKPDRIVLEVTRHLKKPLKERLEIEKRNKAENQLHEKLAEELYREAGVAKVRRDDIIKMKLWRQQGEVCVYTGRQIGIKQLIDGSTDVDHIIPYSRSLDDSQTNKVVCFRDANTEKGNRTPWETWGSDEGRWHEIKQRVAKLPTGKVKRLLADQEALEKLVGVDFIARQLNDTSYASRAIRDYLIEVCPDVLMSRGSLTSELRTLWGLNKVLHRQLGDETPLKNRDDHRHHAVDALVLALSSRSALQRLSTFNARAVRESGAKPRLDAPWPDLLEKAVRAIHGILVSHAMTQKVSGRFHEETIYGRARERFTGRPRRDERGDLFTVRKSLSSFTDTNMVYKIADDVIRGLAFKRLVEYGVDRADLEAGKKVKIPKGAFSTPLWIPSRHGEHDRAVKKVRIILTASKMFNLRGSEDNVQGAYVEPGNNYCYAIYKDERGKVNGIVITMFEAYRRRALGLPVVDPMAIPGAKLSSVFRENVMYVDASASEYETGKTDREWISSRLRRTKKITSGKITFIGHTLSRDKIEFADGATKELSYSKSPANALGQVVEIDVLGRVKNSDTK

SEQ ID NO: 9308 - protein, 1048 aa, synthetic construct
  REGION 1..1048: note = Synthetic
MSKVLGLDIGSNSVGWALVDLSASNIVGMGVRIFPESVESPNTEKEQSKNVTRRLKRQVRRQYERRRMRKDAVRRMLFHLNLLPTDPETFRDTLKQDPYELRMRALNERMELYEIGRIVDHLASRRGFQSNRKTSSDEESSGVIYEGAKDGSKPGINDIDESLNPELRLYSSFLKNRSELIQNLPALTDGYRTVGEYLYSLDPHVRRRRCRFTLRDHFKIELDIILGRQSKYYPDLLTDSVINQIRNTVFFQRPLKSARKLVGQCRFEPGKKRCHKSHPEFQRFRFLQQMNSLRIRSQGRIEEDDMMLTPSERVALELYVKQKGALDTSKPKNVKDALGWKDKTIFQINAERVDGLSTYRSLTQALGADTIAAMNRNEIHELWNTLNYAADKDWIIDEWKPKGLTLSREQRQSLAKIKLEDGYGSLSLRAIRKILPFLEEGMQYSEAATAAGYTFTDTLISVPITDIVPRLAPEDARNPIVQRSFAETRKVVNAIIRKWGNPDVIRIELGRELRVPAFERARMQKEMYKNRDRNEADRQRLREEYNIAHGSVTDVLKLRLWEEQQYECIYTGKPISKNMLFNGSTDIDHILPYSRTLDDGRENKVLCLREANASKGDRIPMEACDEGIFNRESFKQRVDNLISKHNISVSKQRKLLMTTDVFNERFTNDDETGFVARQLNDTRFAARLALKYLRNVSPSVQAVTGQMTAMLRRKWGLDGVLTELAAAGRAWVAPSNEPGRKDRSDHRHHAIDALTVALTDRSLVKRISDMNVRTGSAKDALLDGRLALPDAPLPGVRALALRVVDNIIVSHRIGRPGRGPLHEETFYGISRDRDGNQLYNERDVPLFVVRKPLSSLTSNEITDIVDPVVKKVVFDRLAFMGVNTETEKFTVPKNAFAEPLYLPRRDGSRGHVIRRVRVYKASTGMHQLRRDGLFVETGGNDFIRIIRTPGSKKALWEVRTLLDTATNAKSKIESVGDGQELKLRIGELVRFTDGDIYKVQKVRKDNGQVGLYHHADATGDVKHLRNPYPSGITGDKLRVDHIGFLIES

SEQ ID NO: 9309 - protein, 875 aa, synthetic construct
  REGION 1..875: note = Synthetic
KTYETSRNSLVGRLPSSDGGFRTAGEYLHSLNPHVRRRRCRFTLRDHYKIELDLILRIQAQHHPTVLTQEVIDQIMTTVFFQRPLRSARHLVGACRFEPGKKRVHRSHPEFQRFRILQQINALRIRTYGRIEEEDMALTPLERAALLFYLEQHGSVDLTKPMTVKKALGWKEKFVFQPNLEKIDGPTTYRKLADAIGASTVKSMTRDQLHDLWNILNFAEDEEWFLSNWEPKHGAYTSEQRQALAKIRLEQGYGSLSLRAVRKILPFLEEGMMYHDAATAAGYVFTDSLTNVPVGDRVPSLAPEDARNPIVQRSFAETRRVVNAIVRKWGNPDVIRIELGRELRLPKFKRVDLQKTNYKNRDANTSDRERLKEEYGIEHGSRADVLKYRLWREQGRVCIYTGQPISQNMLYGGAVDIDHILPYSRTLDDGRENKVLCLREINARKGDLTPMEACARGIIDEASFKERVNSLVRNNALSAAKQRRLLMTPDVFAERFSSDENTGFIARQLNDTRFAARLATKYLRHVSPKIEAVTGQMTSLLRYRWGLEGVLPELASEGRAWSAPDAEPGRKDRNDHRHHAIDALTVALTDRTAVTRIASMNARTGNAARASDEGRLDVPEPAIPGIRGLAKRMIDNVIVSHRVSRPGRGAFHEETLYGIARDRSGEHKINENEIPLYVVRKPLTALTANEITNIVDPVVRSLVYERLMQMGIDPFAGKFVVPKDAFAEPLHQRSSSGSRGHIIRRVRVFKASRVMRLLKSDGPFIETGGNDRMLISAPDKKSKVSWNVLTYLDVARNVELDFRPELTIRIGTTLDLREKGIYRVQKINRADGQVTLRHHAAASIMDNASRELRSPNTLNAVPVGLSVLGLPIELE

SEQ ID NO: 9310 - protein, 1054 aa, synthetic construct; identical to SEQ ID NO: 8174
  REGION 1..1054: note = Synthetic

SEQ ID NO: 9311 - protein, 1050 aa, synthetic construct
  REGION 1..1050: note = Synthetic
MSKVLGLDVGYASLGWAVVDTDEQNITAMGVRIFTEGVANINSSQEQTRNAQRRMKRRMRRQYERARERRLALRKYLTEQQLLPSDGDALQALFATDPYDLRARGLDHQLSLHEIGRVIDHINARRGFRSNRKVAKDDDEGTIYEGSNDSGMVGINQITQALDSRVSRLKSYTAVRDEIVKHRGPLTNGFRTAGEYLASLNPHEVRRRKRFMLREHLEIELDLLLRKQAAYYPQLTPEVIHRIAHLVFWQRPLQSVRHLVGKCQFEPGKKRAHKSHPDYQRFRMLQQVNTLEVYGPGRVLDDDRKLTPKEREKLITYLTTEGKSVNLNKDRKKIYKTLGLTAQGEYTFNLETLNACTTVKALRDIFGADRIVQMTRDEINEIWNVFNMVEDNEWLEEYAKTTWGLTAEQAKKATSLKLEDGYGSVSLRAARKILEYLEDGWPYHEACARAGYHHSKPDVPDENHLEPRVRALAQNENRNPIVQRSFSEMRKVVNALLDEYGPFDSIRVELGRELRKPKNDRLEIDKRNKKNRDENDIIREKLKTECRLETVSRADLERYKLWEQQNHQCIYTGKQISLNELFGGQVDVDHVLPYSRTLDDSRANKVVCTREANARKGNLTPAEACGRGIFDAQQLRERVEALARALKIDKQKASRFFIDDEGMAKLYGDDFTERALNDTRYVGRLTATYLRYVCKDVIVSNGTLTDRLRRRWELDAVIPDLAKIGRAWLDEKAHSNGQKSRADHRHHAIDALVVALTDRSLIKRLSTLNARGDDGNGKHYNDGRVLLPDCPIPGIKKLATDCVDSIIVSHRVNRKVRGQLHEETLYGRLRDAFGNQLVNENGIPLYVVRKPLTSITMNEAHDILDPVVRRIVLERIEAHGGHKDNKLHPNTFLAPLYKERKDGTKGPQIKRVRVAKASSGMQAIRNGTVFVETGSNDHIRLYPFDQSGKKRQYRVYTLFESAKAAAAADTDKDYVSFRINELYVHDVPKPGEKLDPWKVYRVQKINANDGRIFFRHHAAASLDDNNARLIKSPNTLIGVKQVISILGVPR

SEQ ID NO: 9312 - protein, 1050 aa, synthetic construct
  REGION 1..1050: note = Synthetic
MSKVLGLDVGYASLGWAVVDTDEQNITAMGVRIFTEGVANINSSQEQTRNAQRRMKRRMRRQYERARERRLALRKYLTEQQLLPSDGDALQALFATDPYDLRARGLDHQLSLHEIGRVIDHINARRGFRSNRKVAKDDDEGTIYEGSNDSGMVGINQITQALDSRVSRLKSYTAVRDEIVKHRGPLTNGFRTAGEYLASLNPHEVRRRKRFMLREHLEIELDLLLRKQAAYYPQLTPEVIHRIAHLVFWQRPLQSVRHLVGKCQFEPGKKRAHKSHPDYQRFRMLQQVNTLEVYGPGRVLDDDRKLTPKEREKLITYLTTEGKSVNLNKDRKKIYKTLGLTAQGEYTFNLETLNACTTVKALRDIFGADRIVQMTRDEINEIWNVFNMAEDNEWLEEYAKTTWGLTAEQAKKATSLKLEDGYGSVSLRAARKILEYLEDGWPYHEACARAGYHHSKPDVPDENHLEPRVRALAQNENRNPIVQRSFSEMRKVVNALLDEYGPFDSIRVELGRELRKPKNDRLEIDKRNKKNRDENDIIREKLKTECRLETVSRADLERYKLWEQQNHQCIYTGKQISLNELFGGQVDVDHVLPYSRTLDDSRANKVVCTREANARKGNLTPAEACGRGIFDAQQLRERVEALARALKIDKQKASRFFIDDEGMAKLYGDDFTERALNDTRYVGRLTATYLRYVCKDVIVSNGTLTDRLRRRWELDAVIPDLAKIGRAWLDEKAHSNGQKSRADHRHHAIDALVVALTDRSLIKRLSTLNARGDDGNGKHYNDGRVLLPDCPIPGIKKLATDCVDSIIVSHRVNRKVRGQLHEETLYGRLRDAFGNQLVNENGIPLYVVRKPLTSITMNEAHDILDPVVRRIVLERIEAHGGHKDNKLHPNTFLAPLYKERKDGTKGPQIKRVRVAKASSGMQAIRNGTVFVETGSNDHIRLYPFDQSGKKRQYRVYTLFESAKAAAAADTDKDYVSFRINELYVHDVPKPGEKLDPWKVYRVQKINANDGRIFFRHHAAASLDDNNARLIKSPNTLIGVKQVISILGVPR

SEQ ID NO: 9313 - protein, 1049 aa, synthetic construct
  REGION 1..1049: note = Synthetic
MGKILGLDVGYASLGWAVIDTNRQDVAAMGVRIFTEGVANINGNQEQSRNAQRRMKRQMRRQYERARERRLQLRKYLLSMSLLPSDGEELQRLFATDPYALRAKGLDHPLTLHEIGRVVDHINARRGFRSNRKVAKDDDEGTIYDGSNDSGMVGINEINKSLVPALCKLKSYSLVAEEYARMQGPSPHGFRTAGEYLASLNPHQVRRRKRFLLREHLEIELDLLLRKQAVYHTQLTPDVIARIARLVFWQRPLKSVRHLVGKCQFEPGKKRAHKSHPDYQRFRMLQQVNNLEIYGPGRVLDDDRVLTPKEREKLITYLTTEGKPVNLSKHTSKVYKTLGLTTKGDYTFNLEVLNACTTMKALREVFGADRIVQMTRDEINEIWNVFNMAEDNEWLEEYAKTTWRLNSEQAKNATSLKLEDGYGSVSLRAARRILEHLEEGWPYHEACARAGYHHSKPDVPDENNLEPRVRALAQNENRNPIVQRSFSEMRKVVNALLQEHGPFDSIHVELGRELRKSQSERKKIDTSNKKNRDANDIIREKLKKECGLEKVTRADLERYKLWEEQNHRCIYTGESISLNQLFGGEVDVDHILPYSRTLDDSRSNKVVCTRTANAQKGNLTPAEACGRGIFDAHRLKEHVEALARSLKIDKRKASRFFLDDEGMTKLYGDDFTERALNDTRYVGRLTSTYLRYVCKDVIVTNGTMTDRLRRRWELDAVIPDLAKIGRAWLDEKAHSNGQKSRADHRHHAIDALVVALTDRSLIQRLATMNARDDGNGKRYNDGRVLLPDCPIPGIKKLATDCVDRIVVSHRVNRKVRGQLHEETLYGRLRDALGNPRLNENGIQLYVVRKPLTSITLNEAHDILDPVVRRLVLERIEAHGGHKDNKLHPNTFLAPLYKDRRDGLQGPQIKRVRVTKASSGMQNIRNGTVFVETGSNDHIRLHPFDANGKKRPWRVYTLFESAKAGATDPDKDFVSFRINELYVHDVPKPGEELDPWSVYRVKDISAEGRIRFAHHADASKDNTLSQHRKNASKIVGCKASADVIGRIQLT

SEQ ID NO: 9314 - protein, 1048 aa, synthetic construct
  REGION 1..1048: note = Synthetic
MGKILGLDVGYASLGWAVIDTNRQDVAAMGVRIFTEGVANINSNQEQSRNAQRRMKRQMRRQYERARERRLQLRKYLLSMSLLPSDGEELQRLFATDPYALRAKGLDHPLTLHEIGRVVDHINARRGFRSNRKVAKDDEEGTIYEGSNDSGMVGINEINKSLVPALCKLKSYALVAEEYARMQGPSPHGFRTAGEYLASLNPHQVRRRKRFLLREHLEIELDLLLRKQAVYHTQLTPDVIARIARLVFWQRPLKSVRHLVGKCQFEPGKKRAHKSHPDYQRFRMLQQVNNLEIYGPGRVLDDDRVLTPKEREKLITYLTTEGKSVNLSKDRSKIYKTLGLTTKGDYTFNMEVLNACTTMKALREVFGADRIVQMTRDEINEIWNVFNMAEDNEWLEEYARTTWGLNSEQAKYATSLKLEDGYGSVSLRAARRILEHLEEGWPYHEACARAGYHHSKPDVPDENNLEPRVRALAQNENRNPIVQRSFSEMRKVVNALLKEHGPFDSIRVELGRELRKPSKERVDIDKRNKKNRDDNDIIREKLKKECGLEKVTRADLERYKLWEEQNHRCIYTGESISLNQLFGGEVDVDHILPYSRTLDDSRSNKVVCTRTANAQKGNLTPAEACGRGIFDAHRLKEHVEALARSLKIDKRKASRFFLDDEGMTKLYGDDFTERALNDTRYVGRLTSTYLRYVCKDVIVTNGTMTDRLRRRWELDAVIPDLAKIGRAWLDEKAHSNGQKSRADHRHHAIDALVVALTDRSLIQRLATMNARDDGNGKRYNDGRVLLPDCPIPGIKKLATDCVDRIIVSHRVNRKVRGQLHEETLYGRLRDALGNPRLNENGIQLYVVRKQLTSITLNEAHDILDPVVRRLVLERIEAHGGHKDNKLHPNTFLAPLYKERRDGQQGPQIKRVRVAKASSGMQNIRNGTVFVETGSNDHIRLHPFDAGGKKRPWRVYTLFESAKAATIDPDKDFVSFRINELYVHDVPKPGEELDPWKVYRVQKVNVKDGEVTCRHHAAASIDNNLARLIKKPNTLKGAKLIVTAVGQAV

SEQ ID NO: 9315 - protein, 1053 aa, synthetic construct
  REGION 1..1053: note = Synthetic
VGKILGLDVGSNSLGWAIVNTDEDAITGMGSRIFTAGVDNLNGENEASRNAQRRLKRQMRRQYERSRQRRNQLRLFLIRNGLLPTESENFDVLLKRDPYHLRKKGLDERLELFEIGRCVDHINARRGFRSNRKASSDEEESGVLFKGSPDDDRPGIDAIMDSLHPELRRMKSYLKVKSRVLDGHPDYSKEFRTAGEYLAGLNPREVRRRKRFLLREHLEIELDLLLTKQSQFHNELTPESIETIMKLVFWQRPLKSVRKLVGNCRFEIGKKRCHKSHPEFQRFRLLQQVNNLEVYGPGRVLDDDRKLTAMERSALLTYLTEEKSIDTTKPRNVLYKLLGLSTKAEYRFNLERLDACSTVAKFTDVFGPDRVAMMSQGEMHSIWNVFNLAEDAEWLEEYAKKTWQLTHDQAVKASKLRLEESYGSLCLKAVRRILPHLENGMLYHEACGLAGYNHSQPDGEIVISDVVPALSSADIRNPIVQTSFAEMRKVVNLLIKRHGPFDSVRVELARELKKPKIERVKIEKRNKGFRDENEQIRQKLRLEFGVDSPKRADIERYKLWEEQNHRCIYTGNAISQDMLFNGPVDIDHIMPYSRTLDDSRNNKVLCLRSINLAKKNMSPSEACDAGVLNRNELRERVDALVRANKINKSKSVRFFMSTEDMQKLYGEDFLLRQLNDTRYIGRLTAKYLRYICEDVVVSNGMLTSALRRRWGLDAVLPDLAAVGRAWLDAEAHSAGTKSRADHRHHAIDALVVALTDRGLLSKVAQLNARGLGADLEKHYADGRIRLPEEPLPGLKAMATRCIDNVIVSHRVNRKRRGQLHEETIYGIAHDDHGVPLTNEKGIPLYVVRKPIESLTASMIMDVVDPVIKGILLERLTVLGIDVSTKFAVPKTAFMEPVYMTTLNGSRGPRIKRVRIYKAASNMVLLRDHGVYVEPGSNDRIILGVVVDGGGSRPRQVLSLLEATDASTKISVDRPFYTYRINELYCTSIPSPSESIEVCNVYKVQSVTSDAGGRIKFRHHAAAIDKLPGAEFRLAANKVTGQKMKVDEIGQVSW

SEQ ID NO: 9316 - protein, 912 aa, synthetic construct
  REGION 1..912: note = Synthetic
VIYEGSNDDDKPGINAINDELHPMLCRVKTYETVKERVADGDPEFAKVPRTAGEYLAGLNPREVRRRKRFLLREHLEIELDIILRKQAEFHSLITIELIERIKSLVFWQRPLKSVRKLVGNCRFEPGKKRCHKSHPQFQRFRLLQQLNQFEVYGPGRVLDDDRKLSAMERSALELYLSENKSIDTVKHGKVLYKILGLSSKAEYQFKPERLDACTTMIKFKEMFGPDRLALMSTQEIHEIWNVFNHATDAEWLEEYAMRCWGLTRDQAKAAGQVRLEDGYGSLSLRAIGKILPHLEDEHLYHKACERAGYHHSRPEGDIVVSDVVPSMSNADVRNPIVLRSYSEMRRVVNLLIKRYGPFESIRVELGRELKKPKFERVKIEKRNKEFRDANELIRQKLRVDFGIDNPSRSDVDRYKLWEEQNHRCIYTGKPISQDALFSGPIDVDHILPYSRTLDDGRSNKVLCLREINLAKGNKTPVEACDDGVINRNELRERVEALVRANKYTKAKSVKFFMSTEDMQKIYGDDFLERQLNDTRYVGRLTAKMLRFVCKDVVVTNGLLTSSLRRRWGLDAVLPDLAAEGRAWLDSKVHSAGAKSRADHRHHAIDALVVALTSRSLLAAVAKLNARGLGADLEKHYADGRIRLPEEPLAGLKAMARRHVDSIIVSHAVNRKRRGQLHEETIYGVAHDEHGVPLMNGAGIPLYVVRKPVEALTASMVEDIVDPVIKELVLDRLSRLGVDVASKYTIPKTAFLEPLYIRTKDGERGPRIKRVRIYKPSSNMVQLRANGAFAEPGSNDHIRLYDFDALGKKRTWKVLSLFESLSARAGGPDSEPPVMTLRINEMYVHEVPLPGDPIDSWGLYRVQKLEKKAGKIAFRHHAAASLDDNSSRLFTAPNTTRGVKVQVNSIGEVVFR

SEQ ID NO: 9317 - protein, 1061 aa, synthetic construct
  REGION 1..1061: note = Synthetic
MIAKEKSMGRVLGLDVGSNSLGWAIVDQSEDAIIGMGVRVFTAGVDNLNGEKEESRNAQRRLKRQLRRQYERTRQRRNALRWFLIENGLLPNVADDYADLLRQDPYALRKKGLDHDLEPFEIGRIVDHINARRGFRSNRKASSDEESSGVIYEGSKDDAKPGINAINDELQPMLRSVKLYESVRERVVAGDPDFAKVPRTAGEYLAGLNPREVRRRKRFLLREHLEIELDLILRKQAQFHSMLTHEVIDRIKSLVFWQRPLKSVRKLVGNCRFEPGKKRCHKSHPQFQRFRLLQQLNQFEVYGPGRVLDDDSKLTAAERSALERYLTEKKSIDTVKNSKDLYKILGLTSKADYRFKPERLDACTTMIKLREVFGPDRLALMSTQEIHEVWNVFNLATDAEWLEEYSVRSWGLTRDQAKTAAKVRLEDGYGSLSLRAIGKILPHLELGYMYHEACELAGYHHSRPEGDVEVSDVVPAMSNADVRNPIVLRSYSEMRRVVNLLIKRYGPFESIRVELGRELKKPKFERLKIEKRNKDFRDANELIRQRLRVDFGIQNPSRSDIDRYRLWEEQNHKCIYTGKAISQDSLFSGPIDVDHILPYSRTLDDGRSNKVLCLREINLAKGNMTPVEACDAGIIIRTELRERVEALVRANKYTKSKSVKFFMSTEDMQKIYGDDFVERQLNDTRYVGRLTAQKLRFVCKDVVVTNGLLTSSLRRRWGLDAILPDLAADGRAWLDSKAHSAGAKSRADHRHHAVDALVVALTSRSLLAAVAKLNARGLGADVEKHYADGRIRLPEEPLAGLKAMARQRVDSIAVSHAVNRKRRGQLHEETIYGIAHDEHGVPLTNDAGIPLYVVRKPVESLTASMVEDIVDPAIKALVLERLSSLGVDVSSKYIVPKTAFLEPLYMLSKDGKRGPRIKRVRIYKASSNMVQLRVNGAFAEPGSNDHIRLYDFDAVGKKRKWRVLSLFESLSARAGLPDPEPPIMTLRINEMYLNAVPLPGDPIDSWGLYRVQYMDKKAGTVAFRHHSSASINDNASRLFTTPNTTKGVKVHVNSIGEVVFR

SEQ ID NO: 9318 - protein, 1042 aa, synthetic construct
  REGION 1..1042: note = Synthetic
MARKLGLDLGSNSLGWAIVDTTAGDIIAMGVRIFTEGVANIDTINEESRNAQRRMKRQIRRQYERRRRRKDALRAFLIELGLLPADPLQYEEVFATDPYELRAKGLDEPLSAHELGRVVDHINARRGFRSNRKAASDEEDSGVLYEGSKDDAKPGINAISENLDPRLRKLKDYDLVRQQLVLGSLADLTGNRTAGEYLAQLDPHQVRRRKRFLLREHLEIELDLLLRKQAEHHHVLTTEVQEKLKKLTFWQRPLRSVRHLVGNCRFEPQKKRAHKSHPEYQRFRMLQQVNNLEVFGPGRVLDDDRKLKAGEREALINHLSTDLSIDTDKGRSKITKLMGLPTKSEYKFNIERLDACGTERSVCEAIGRDRWLIMSKEEQHELWNVLNLAESREWLEEYSVKKWGLTQEQAKALAKVRLEDGYGSLSLRAIRRILPYLEEGRIYNEACVAAGYHHSQPDEEPVLTDTMPMVPHSEIRNPIVITSFSEMRKVVNLLIKRYGPFDSIHVEMARELKKPKADRLKIEKRNKGFRDENEIIRGTLRKEFGVDKPTKADVERYKLWEEQNHKCMYTGKPISQDMLFSGPVDVDHILPYSRTLDDSRTNKVLCLREINQAKGNLTPREACNAGIINYDQLRERVESLVRANKVTKLKSTRIFMTEEEMSKVYGDFVERQLNDTRYVGRLALKYLRYVCKDIVVANGLLTSSLRRRWGLNSVIPELAAIGRAWIDKEAISNGAKSRADHRHHAIDALVVALTDRGLLQRVSTLNARESSITIDKHVADGRIRLPEEPIPGMLSLTKERVDKIIVSHKVRKKRRGQLHEETIYGLAHDENGVPLLNESGIPLYVVRKPLSSITAGEAAAIVDPVVKTIVYERLASLGVDTSGKFTMPKNAFAEPLFMPRKNGQRGPQIRRVRVYKPSSGMVRLREHGAYVEPGSNDHIRVFERDGSGKRTGTVHTLLEATSRSFKPARAEYTLRLGELYAFSDVIETGSIYRVQQIGKTDQRVVFRHATAATIQDKESRVIKVINSLDGVRIRVDAIGQVV

SEQ ID NO: 9319 - protein, 1053 aa, synthetic construct
  REGION 1..1053: note = Synthetic
MGKVLGLDLGSNSLGWAVIDLDNNTVDGMGVRIFTAGVDSVNQEKEESRNAKRRMKRQVRRQYERRSRRRAALRRYLQKTGLLPTAEAELTKLLSINPYMLRKSALDNRIEPHEMGRIIDHINSRRGFRSNRKASADEEVSGVMYSGSMADSKPGITVIDESIDPRLRRMKSFKSNKQLILNGELGALNGYRTTGEYLASLNTNEVRQRNRFLLREHLEVELDLILGIQAKYHDLLTDEVIDVIKNLVFFQRPLKSARALVGNCRFEIGKKRAHKSHPEYQRFRMLQQVNAFKVFGPGRVLDDDRILKPDERAALINALSNGNSIDTTAKKGTNISKIIGLPGKAEYSFSVDRLDACSTARKLSAILGQDAVISMSREKLHSVWNVLNMAEHTEWLEKHAIEKWGFTPSQAIQISKLKLEEGYAALSLKAIRKILPFLEEGLMYHEACAEAGYHHSRPDGPVQLSNVVPALSNIDIRNPIVMTSYAEMRKVVNLLIKKYGSFDEIHVELARELKKPKSERLQIQKRQKGFRDENEIIRSKLRLEFGIDKPTKSDIERYKLWEEQNHRCMYTGKPISQDMLFSGPVDVDHILPYSRTLDDSRMNKVLCLKDVNIAKGDRTPREACDAGLISYNELRERVEALVRVYKIAKAKSARLFMTTEEMQKLYGENFVERQLNDTRYVGRLTLSKLRYVCENVVVANGLLTSSLRRRWGLNSVVPDLAKEGRAWIDDEAYSNGVKSRADHRHHAVDALVVALTSRSLLQRVATLNARSAGTKIEQHFADGRIRLPDEPIPGLVAIAKRMVDKIVVSHKVNRKSRGQLHEETLYGVAHDSFGVPLTNEDGMPLYVIRKSLHSISSGEAKDIVDPIVRKIVLDRIASYGVDVNGKFTIPNNAFELPLYMKRKDGSRGPRIRSVRIFKASSGMVKLRKNGVFVEPGSNDHIRLFQKAEGEKKRRAEVLTLLEKVGGMRPSRESPEVTYRINEVYCATTNADGIDDQVNLYRVQQMSKADSRLVFRQIAAATINNKSARLIKVPSSVDGFKIVVTEIGEVLTKC

SEQ ID NO: 9320 - protein, 905 aa, synthetic construct
  REGION 1..905: note = Synthetic
MADSKPGITVIDESIDPRFRRMKSFKSNKQLILNGELGALNGYRTTGEYLASLNTNEVRQRNRFLLREHLEVELDLILGIQAKYHDLLTDEVIDEIKNLVFSQRPLKSARALVGNCRFEIGKKRAHKSHPEYQRFRMLQQVNAFKVFGPGRVLDDDRILKPDERAALINALSNGNSIDTTAKKGTNISKIIGLPGKAEYTFSVDRLDACSTVRKLTAILGTDAVISMSREILHSIWNVLNMAEHTEWLERHAVEKWGFTPAQAVQISKVKLEEGYASLSLKAIRKILPFLEEGLMYHEACAEAGYQHSRPDGPVQLSNVVPALSNSDIRNPIVTTSYAEMRKVVNLLIKKYGSFDEVHVELARELKKPKSERLQIQKRQKGFRDENEIIRSKLRLEFRIDRPTKSDVERYKLWEEQNHRCMYTGKPISQDLLFSGPVDVDHILPYSRTLDDSRMNKVLCLKDVNIAKGDLTPREACDAGIISYHELRERVEALVRVYKIAKAKSARLFMTTEEMQKLYGENFVERQLNDTRYVGRLTLSKLGYVCKNVVVANGLLTSSLRRRWGLNSVIPDLAKEGRAWIDDEAHSNGVKSRADHRHHAVDALVVALTSRSLLQRVATLNARSAGTKIEQHFADGRIRLPDEPIPGLVAIAKRMVDKIVVSHKVNRKSRGQLHEETLYGVAHDSFGVPLTNEDGMPLYVIRKSLHSISSGEAKDIVDPIVRKIVLDRIASYGVDVNGKFTIPNNAFELPLYMKRKDGSRGPRIRSVRIFKASSGMVKLRKNGVFVEPGSNDHIRLFQKAEGEKKRRAEVLTLLEKVGGMRPSRESPEVTYRINEVYCATTNADGIDDQVNLYRVQLMSKADSRLVFRQIAAATINNKSARLIKVPSSVDGFKIVVTEIGEVLTKC

SEQ ID NO: 9321 - protein, 1110 aa, synthetic construct; identical to SEQ ID NO: 7645
  REGION 1..1110: note = Synthetic

SEQ ID NO: 9322 - protein, 811 aa, synthetic construct
  REGION 1..811: note = Synthetic
FNIKYHDKLLESDLPTFLRDYVIYYQRKLKSQKGLVSPCKLEPKAKRAPASCLLFQEFRILQKLHDIRLIGKGKTNESLTQKQVENAFEWLNISPDKNFKQLKKELKISDDELNFKETDKIKGNRTAYELSKVFGKLVWNSFSEKEQFNRWRILYDAEDDDWLTNYGKQKWGLTAAETDKLLKVSLEKDYAELSQTAMKKLVPLMKSGGLDYTDAAKKAGYDHGLNTKKETLSDILGEPQNLRNPIVQQGLFELRKTVNAIIKDYGAKPDKIRIEFARELKMPKKKREGLSNANKNREKERDEIRNILFDEFNIKEPSRTDILKYQLWLETNKQCLYTGEFIGKEELFSPNIEIEHIEPLSRSLNDSQSNKTLSIKRFNNLKGNDLPFEMMEKGKITTSEYDEIVERAKILVRKGGYNKFRRFLKKSIDADMVSRQLNDTAWLAVEARRYLQTICPNVEVIAGQATAELRHLWGLNRILNRHGLDIKNRDDHRHHAVDAVVVACTDIGMIQQLSKLHEKGRKATNERFPPPWEGFRNDVKDAVNQILIKHKVRSRVRGQLHDETIYGPVKGFQQQQLTNERGLPVFKSRKELTALSEAMIDKIGDKKIKEIVKNRIREHGVEPTGKFKIPANAFSEPLYLPTKKGGKIPIRRVRIHDVATSKIKLKAGKYVDSGNNHHIVIFSKPDGKKDGIVVSLFEVAQRKRNKQPIYQTDVGEENTFLMTLQINELVLLNGEHFEAAEINWNNVSNEELSPYLYRIQMLTDGKVTFRHHLTSVLKNDSNVEIGRAIKTPNSFNGIKVTVNESGEIRPA

SEQ ID NO: 9323 - protein, 790 aa, synthetic construct
  REGION 1..790: note = Synthetic
VIYYQRKLKSQKGLVSPCKLEPKAKRAPASCLLFQEFRILQKLHDIRLIGKGKTNESLTQKQVENAFEWLNISPDKNFKQLKKELKISDDELNFKETDKIKGNRTAYELSKVFGKLVWNSFSEKEQFNRWRILYDAEDDDWLTNYGKQKWGLTAAETDKLLKVSLEKDYAELSQTAMKKLVPLMKSGGLDYTDAAKKAGYDHGLNTKKETLSDILGEPQNLRNPIVQQGLFELRKTVNAIIKDYGAKPDKIRIEFARELKMPKKKREGLSNANKNREKERDEIRNILFDEFNIKEPSRTDILKYQLWLETNKQCLYTGEFIGKEELFSPNIEIEHIEPLSRSLNDSQSNKTLSIKRFNNLKGNDLPFEMMEKGKITTSEYDEIVERAKILVRKGGYNKFRRFLKKSIDADMVSRQLNDTAWLAVEARKYLQTICPNVEVIAGQATAELRHLWGLNRILNRHGLDIKNRDDHRHHAVDAVVVACTDIGMIQQLSKLHEKGRKATNERFPPPWEGFRNDVKDAVNQILIKHKVRSRVRGQLHDETIYGPVKGFQQQQLTNERGLPVFKSRKELTALSEAMIDKIGDKKIKEIVKNRIREHGVEPTGKFKIPANAFSEPLYLPTKKGGKIPIRRVRIHDVATSKIKLKTGKYVDSGNNHHIVIFSKPDGKKDGIVVSLFEVAQRKRNKQPIYQTDVGEENTFLMTLQINELVLLNGEHFEAAEINWNNVSNEELSPYLYRIQMLTDGKVTFRHHLTSVLKNDSNVEIGRAIKTPNSFNGIKVTVNELGEIRPA

SEQ ID NO: 9324 - protein, 995 aa, synthetic construct; identical to SEQ ID NO: 8710
  REGION 1..995: note = Synthetic

SEQ ID NO: 9325 - protein, 1001 aa, synthetic construct
  REGION 1..1001: note = Synthetic
LARNDLGGYMSKILGLDLGTNSIGWAIIDDAAEEIIDSGVRIFQEGVNRSNTGSELSKNADRRNARQIRRQFQRRRMRRQSLAKYLEEIGLYDTNQKNEINKINPYEVRAKSLGKMLEPFELGRALQHINQRRGFKSNRKTGDNEDSKVFTGGNEGVIGINETQKAMQEQNCRTLGEYLFQLDSKTSRRRNRYTHRAMYIHEFNLIWDHQQPFYPEILTDEHKDFIYHKIFDQRKLKSQKHTVGKCSLEPKKHASPKSSPVFQHFRILEQLSRITISTPERDRSMLTTEEWEILKTALFQKKEIKFPTIRKLLGLPSNCRINIEDLGKLEGHKTYYSLKACFGQEMWAKLSDEKKYEIWHTLHFSDSEEWLKRYASDKWGLSTEQTGRILKVQLEQGYARLSHKALSKLIANWKPGLAYDKVVEASGYHFSQNTNAENLKEKLPIPENIRNPIVMKALYEVRQVVNCLIDEFGKPDVVRVELARELKQGKRIRDKQRIENFKRQRKADSVRSFLSTELEFQHPTREDVQRYLLWEECDKICPYTGKSISVNALFGTEFQIEHIIPYSRSLDDSMANKTLCYWEENQEKHNKIPYEAYSGNEKRYAEIIHRVEKKLKHKLHKFLLKTVDDDFVSQQLNDTAYISRATAQYLKEVFPKVQGVKGGTTARLRHFWGLNSILSGSIELKNREDHRHHAVDALVVANTTPSYVHSLSKYHEYDQTPRMERFPDPWKTFRTDSTKSIANILVSHKVRKRVRGKLHEETNYGKINVNGVEHFVVRKPIESLTPKMIGNIVDHAVRDRILSRLKDLQVDTSGKYTIPKETFTKPAYMRGGKVQIKSVRVKIPASNMILLRPDQNLYVEPGSNHHIDIFRNEDGKHKGIVTSLYSEAQSILKGTQSKHNEPIGGSWTLWNSFSINELILLDVDEEQINWKNPPEGYILGGQLFRIQKMDVNSNITLRHHTIASLKNSEGIELGRVNKRGGSLKGTKVTVDPIGKLQRTDE

SEQ ID NO: 9326 - protein, 992 aa, synthetic construct
  REGION 1..992: note = Synthetic
MSKILGLDLGTNSIGWAIIDDAAEEIIDSGVRIFQEGVNRSNTGSELSKNADRRNARQIRRQFQRRRMRRQSLAKYLEEIGLYDTNQKNEINQINPYEVRAKGLDKMLEPFELGRALQHINQRRGFKSNRKTGDNEDSKVFTGGNEGVIGINETQKAMQEQNCRTLGEYLFQLDSKTSRRRNRYTHRAMYIHEFNLIWDHQQPFYPEILTDEHKDFIYHKIFDQRKLKSQKHTVGKCSLEPKKHASPKSSPVFQHFRILEQLSRITISTPERDRSMLTTEEWEILKTALFQKKEIKFPTIRKLLGLPSNCHINIEDLGKLEGHKTYYSLKACFGQEMWAKLSDEKKYEIWHTLHFSDSEEWLKRYASDKWGLSTEQTGRILKVQLEQGYARLSHKALSKLIANWKPGLTYDKVVEASGYHFSQNTNAENLKEKLPIPENIRNPIVMKALYEVRQVVNCLIDEFGKPDVVRVELARELKQGKRIRDKQRIENFKRQRKADSVRSFLSTELEFQHPTREDVQRYLLWEECDKICPYTGKSISVNALFGTEFQIEHIIPYSRSLDDSMANKTLCYWEENQEKHNKTPYEAYSGDEKRYAEIIHRVEKKLKHKLHKFLLKTVDDDFVSQQLNDTAYISRATAQYLREVFPKVQGVKGGTTARLRHFWGLNSILSGSIELKNREDHRHHAVDALVVANTTPSYVNSLSKYHEYDQTPRMERFPDPWKTFRTDSTKSIANILVSHKVRKRVRGKLHEETNYGKINVNGVEHFVVRKPIESLTPKMIGNIVDHAVRDRILSRLKDLQVDTSGKYTIPKETFTKPAYMRGGKVQIKSVRVKIPASNMILLRPDQNLYVEPGSNHHIDIFRNEDGKHKGIVTSLYSEAQSILKGTQSKHNEPIGGSWTLWNSFSINELILLDVDEEQINWKNPPEGYILGGQLFRIQKMDVNSNITLRHHTIASLKNSEGIELGRVNKRGGSLKGTKVTVDPIGKLQRTDE

SEQ ID NO: 9327 - protein, 1007 aa, synthetic construct
  REGION 1..1007: note = Synthetic
MSRVLGLDLGSNSIGWALIDEQKEQIIDSGVRVFQEGINRNTSGSEVSKNKDRRDARGARRQNFRYKMRRDTLVNSLKKIGLYPENKDDLQEFFEIDPYEVRKNGLTEKLSLHEFGRALYHISQRRGFKSNRKTASKEDGAIFKGNDNTTGIDSAREQMNKQSCLTIGEYLASIDTGKERRRNRYTLRDWYEQEFEKLWEKQQSFYPDLLTEKEKQHFFKVIFFQRKLRSQKHTVGYCTFEKKKRCAPKSSPVFQYFRILEQINRIRIITDDRINEPLTQEERGILINKLNIVKDLDFKKLKKLLKLPEDTIINLDLDKLLGNNTYYEIQKIFGKPRFAKMTDDEKFNIWHTLHFSNDDEWLCKYARKNWSLNDEEIKKLMRNGIENKPNDGYARLSSKALKKFIPYLEEGLRYDEAAREAGYHHSQVNNNHELFDFLQDPPNIRNPIVQQALFQLKKVINALIQEYGKPDMVRVELARELKLPKDRREKIRIENKQRQTEAEKIRELLKQEMNFIKPERDDVIKYLLWQECNKRDPYSGKFISLAELYSPEYEIEHIIPYSRSLDDSYANKTLCRRDYNKEKGNKTPFEAFGHKPEFEFMVRRVKDFNISGRNGKLAKFQLEKVDEKLSEEFFHRQLNDTAYISRAAAAYLKTVFPKVHIVKGGATAKLRYFWGLNSILSGDIEVKTRDDHRHHAVDALVVANINQPMLHELSVCNKYNINVDFANDNSFPMPWKNFHQQAEKSVNNILVSFFQRNRARGKLHEETNYGEIIDPETGKKTYVVRKPVQALTGKMIRDIVNRETRQVILDRLREKGADITGKKLNIPKETFAEPLFHPKTGHPIKSVRVKVPSTNMIRLYEDRNLFVEPGKNHHIEIFASADKKQKTGYVVTLYEAVQRKKQGLPVINKTPLDKKYPHFVMSLAINDMFLHDMEEKDVDWDQPDITKLSPNLYRVQKMDVNKNIALRYHTITLSDQSDPGALRKIPNTLFGIKVKIDPLGRIGPCYD

SEQ ID NO: 9328 - protein, 1005 aa, synthetic construct
  REGION 1..1005: note = Synthetic
MSKILGLDLGSNSIGWALIDDMKQSVVASGVRIFQEGVNRNTSGSEVSKNVVRRMARNIRRQNFRFRMRRDTLRHALQKLEMFPRHPEEENSFFKIDPYEIRKNGLSQKLTLFEIGRVLYHLNQHRGFLSNRKTASNEDGKLFQGGDNTLGIDYSREKLQTGAYQTLGEYLASINPHEERRRNRYTLRKWYLEEFEKLWQTQERYYPEKMNAREREFVKDVIFFQRRLRSQKGLVGYCTFEPKKRCSPKSSPVFQYFRILEQVNRLRVTVDERINDPLTADERIALINELNQTSILDIKKIRKVLGLPPETWINLDTEKILGNHTYSEIRRIWGADRFKTMTEEEKYQIWFTIHFAYDDEWLKKYAEKNWGLDEKQIDKLIKNNMESKPNDGYAHLSHKAMKKIMPFLEHGVRYDEAAANAGYHQSQMENIENFAEYLPDPDNIRNPIVQQALFQLKKVVNTLIQNYGKPDIIRVELARELKLPKQKREQMRFENLERQQEHEKIRTRLENEHGFNAPGRDDIIKYRLFEECGGIDPYSGDHIPISDLFSGRYEIEHIIPYSRSLDDSFANKTLCRSDYNRKKSNQTPYEAFGHLDEYEFMLNRVRKFKSKNAHGKLQKFAAIDVDKQLSDEFFHRQLNDSAYIARQSRQYLGQICKKVNVVNGRTTSKLRYLWGLNSILSDNELVKSNDDHRHHAVDAFVVALTTSRMLHSMSSYHKYNANYLVKEARFPLPWNGFRQQVEESIERIFISHHFRNRVRGQLHEETNYGRIVDPESGEQIFVVRKQLTSLSGKNVTNIVNPETRALVFERLRAFGITPGQKKIQIPKDAFAEPLVHAGTGHPIKSVRVKIPASNMIQLYSDRKLFVEPGNNHHIEIFASKDGQKRTGYVVSLFEAMKRKKMGEPVIDKNPRESKFPTFVMSLAINELFLFGKDSLDSWNELDPKEISANLYRVQKIDVNNNIVLRHHTISLSGQDDPGVLRKIPNTLQGIKVTISHIGLLEIADD

SEQ ID NO: 9329 - protein, 1006 aa, synthetic construct
  REGION 1..1006: note = Synthetic
MPQVLGIDLGPNSIGWALINEEKNQIIDTGVRIFQEGVNRPQGKEESKNKARRDARGARRRNFRYKMRRNTLIKALKKLGMFPDDPYAVQDYFKMDPYLLRKRGLDEKLTLVELGRALYHLDQRRGFLSNRKAGGNEDSAIFKGDQVKAGINEVKIILEENKYRTFGEYLASLDPHDKRRRNRYTLRLWYKEEFEKLWTKQQEFYPEQLNDQEKAFIYKLIFMQRPLRSQKHLVGFCTFEKDKRCAPKSSPVFQYFRVLEQVNRLRIGTTERKNEPLNDEERKTLIDYLNVNSKLEFKKMLKLLHLPEDTIINLDTEKLLGNHTYSELVKIFGIDRFTQMTDEKRYEIWHTIHFATHNEWLEKYGREQWGLDDEGIKSLLGNTIENKPNDGYARLSRKAIMKIIPNLEKGARYDEAALAAGYHHSIVDEVKPVEFLPDPNNIRNPIVQQALYQLKKLINAILLNYERPDIIRVELARELKASKDQRTEIRIQNIQRQKEAENIRARLIRDNYVQDPKRDDVIKYLLWQECGETDPYSGKKISLTDLYKDPKFEIEHILPYSRSLDDSFANKTLCSIEYNRQKGNRTPWEAFGHSNDYELMLERVRKFKSEKAFSKLRKFQVKDLAAELEDEFINRQLNDTAYISREARKYLQQITPRVDIVKGGATAKLRTLWGMNSILSGDENVKTRADHRHHAVDALVVAQTTLGMLHKLSSYHKYNNPNYAKKDLFAKPWDSFREEAETAVNSILVSYHFRNRARGKLHEETNYGQITDPESGEKVYVVRKSIESITAKMIGNIVNPETRKLVYQRLRQCGVNTQQKKWDIPKQAFAEPLLHPKTGHPIKSVRVKIPAGNMIPLYGEKRKLFVEPGGNHHIEIFANSDYSKKTGYVISLYEAVKRKKAGLPVIDKRPRDTEYPNFVMSLAINEMFLVDVKEEDIDWNNPDQKMLAQNLYRVQKLEIQKHITLRHHTVSLSGSTDPGVISKMPNTINGIKVVINYLGKLGKADA

SEQ ID NO: 9330 - protein, 1006 aa, synthetic construct
  REGION 1..1006: note = Synthetic
MPQVLGIDLGPNSIGWALINEEKNQIIDTGVRIFQEGVNPPQGKEESKNKARRDARGARRRNFRYKMRRNTLIKALKKLGMFPDDPYAVQDYFKMDPYLLRKRGLDEKLTLVELGRALYHLDQRRGFLSNRKAGGNEDSAIFKGDQVKAGINEVKIILEENKYRTFGEYLASLDPHDKRRRNRYTLRLWYKEEFEKLWTKQQEFYPEQLNDQEKAFIYKLIFMQRPLRSQKHLVGFCTFEKDKRCAPKSSPVFQYFRVLEQVNRLRIGTTERKNEPLNDEERKTLIDYLNVNSKLEFKKMLKLLHLPEDTIINLDTEKLLGNHTYSELVKIFGIDRFTQMTDEKRYEIWHTIHFATHNEWLEKYGREQWGLDDEGIKSLLGNTIENKPNDGYARLSRKAIMKIIPNLEKGARYDEAALAAGYHHSIVDEVKPVEFLPDPNNIRNPIVQQALYQLKKLINAILLNYERPDIIRVELARELKASKDQRTEIRIQNIQRQKEAENIRARLIRDNYVQDPKRDDVIKYLLWQECGETDPYSGKKISLTDLYKDPKFEIEHILPYSRSLDDSFANKTLCSIEYNRQKGNRTPWEAFGHSNDYELMLERVRKFKSEKAFSKLRKFQVKDLAAELEDEFINRQLNDTAYISREARKYLQQITPRVDIVKGGATAKLRTLWGMNSILSGDENVKTRADHRHHAVDALVVAQTTLGMLHKLSSYHKYNNPNYAKKDLFAKPWDSFREEAETAVNSILVSYHFRNRARGKLHEETNYGQITDPESGEKVYVVRKSIESITAKMIGNIVNPETRKLVYQRLRQCGVNTQQKKWDIPKQAFAEPLLHPKTGHPIKSVRVKIPAGNMIPLYGEKRKLFVEPGGNHHIEIFANSDYSKKTGYVISLYEAVKRKKAGLPVIDKRPRDTEYPNFVMSLAINEMFLVDVKEEDIDWNNPDQKMLAQNLYRVQKLEIQKHITLRHHTVSLSGSTDPGVISKMPNTINGIKVVINYLGKLGKADA

SEQ ID NO: 9331 - protein, 1002 aa, synthetic construct
  REGION 1..1002: note = Synthetic
MSKILGLDLGTNSIGWAFIDSESKKIIGTGVRIFPEGLNRTPSGSEESKNAQRRTARGMRRRLDRYQMRRSTLQEYLKKQSFYPKEKVEEDLFFKMDPYEIRKKGLDEKLSLYEIGRSIFHINQRRGFKSNRKTAGKDDNKIFKGYSEITGITETEQAIKEGGFRTLGEYLSTLKPEEQRRRNRFALRKMYEEEVDALWEKQRSFYPDELTDDIKNHIKDIVFFQRKLKSQKENVAFCTFESQKRCAPKSSPVYQYFRILETIVRIRITTDDRFDEALGDEERFLLIEKLNKTDRLEIEKIKKILHLPQDTHINLEDQLKIYGNRTYSALSRVFGTKRWDTFSDEKKHEIWHTLHFSDDDLWLEEYARKKWLLNDNEIKKLLIMPLESGYARLSAKAMKNIIPHLEEGLTYDQACLEAGYHHSDIYRPDHLADELPEPENIRNPLVQQSLYELRKLVNTIGDTYGKPEIVRVELLRDLKLSKDKRQQIFIENKRKEKHINEVKEILRNELHFPKITSDAIQKYLLWEESKRRCPYTGKDISLAGLFNGEFEIEHIIPYSRSLDNSMANKTLCHRSVNQEKGNLTPYEAFGNDPQRWFEITTCVKRDMPHKLRKFLMKDVGKEINEDFFNHQYTDSAYISREVSKYLKLICPKVQVTKGGATAQLRQMWGLNTILSVENENKKNREDQRHHAIDALVIANVNPGVLHRLSKCHKYSSEPEQEQFPEPWDNFRNDASDNMDRVLISYKVNPRVRGKLHEETYYGKIRTLEGKETYVVRKPVKSLTAKEIGNIVDPVVRQAVYDRLKSLGVNTDTKLKDIPKEAFVNPLYMPNGKTKIKKVRVIKDSETMYPLYSDNDKLFVQTGSNHHIEIFRHKQGGKGYGRVVRLIDAVKNEKEKLPVIDKTPPNDDYEFAYSLAINEMAIINPCPEIEIQLKEKNYGLITQRLYRVKKIDSLSEVITFIHHLASGKNEVTEKKTIFWATPSTLNAIKVVIDPVGNIYPVND

SEQ ID NO: 9332 - protein, 998 aa, synthetic construct
  REGION 1..998: note = Synthetic
MTKILGLDLGTNSIGWALLDTESQKIIDAGVRVFQEGVARTPTGSEESKNAQRRNARGLRKQNARFKMRRDLLIKILTDLNWYLPESKDAFYKMNPYELRKRGLDEALTLPELGRAIFHLSMRRGFKSNRRAGAKDDSKIFTGYENIIGISETENKIKEGHYRSLGEYLASINSRERRIRGRFTLRKMYESEFEILWEKQKEFHTPEMTDEVKWKLYNDIFKQRKLKSQKRTVRYCTFEPNKKCAPKSSPIFQYYRILEQVSRLKISCDNRSNEPLTDDERFRLITALNEKKELKFEQIKKLLSLPQDAFINLEDQEKLLGNRTEYELSRVFGKKNWSQYSADEKYQIWHTLHFCDDNDWLKKYASEKWKLDEISINKLLDVSLEKGYCNLSAKALKRIIPHLEDGLTYDRAALEAGYNHSQPDQLKEVQDLLPEPENLRNPIVQQTLFELRKLINNLFNTYGKPEIARVELLRELKSSREQRQNIQKEMRIREKEIARARDRIKEIPEYLGKEPSRDDIVKYLLWEECKGICPYTGNHIPLSSLFTGEYHVDHIIPYSRSLDNSFANKTLCHHSTNIEKGNRTPYEAYASDPVRWNEIVQRVTSTMRHKLRKFLLTDVAAEVDDDFFHHQMTDTAYISTEVNKYLKNVCPKVQITKGGATAILRQLWGLNTILSPSINIKTRDDHRHHAIDALVIANVNPGTLHRLSLFHKFNKNVPHENFPEPWPNFRNNAEEVINKILVSHRRNVRVRGKLHEETYYGKITAPDNGRETYVVRKPLAGLTPKMIVNIVDPVVKKMLINRLIEKGVDVGEKFTIPKDAWNQPLFMPDGKTPIKSVRVKCPTETMIRLYQDRKIFVESGNNHHLEIFVNPETGKRIGRVVSLFEATKRLKQKLPLIDKTAPVPDYKFLMSLAINELILVDISDIDWDNPPPSTELSPYLYRVQKMDVNQIITLRHHTVSILKDETGNEPGVLRKNINTINGIKVSINHLGKIRKADD

SEQ ID NO: 9333 - protein, 998 aa, synthetic construct
  REGION 1..998: note = Synthetic
MTKILGLDLGTNSIGWALLDTESQKIIDAGVRVFQEGVARTPTGSEESKNAQRRNARGLRKQNARFKMRRDLLIKILTDLNWYLPESKDAFYKMNPYELRKRGLDEALTLPELGRAIFHLSMRRGFKSNRRAGAKDDSKIFTGYENIIGISETENKIKEGHYRSLGEYLASINSRERRIRGRFTLRKMYESEFEILWEKQKEFHTPEMTDEVKWKLYNAIFKQRKLKSQKRTVRYCTFEPNKKCAPKSSPIFQYYRILEQVSRLKISCDHRFNEPLTDDERFCLITALNEKKELKFEQIKKLLSLPQDAFINLEDQEKLLGNRTEYELSRVFGKKNWSQYSADEKYQIWHTLHFCDDNDWLKKYASEKWKLDEISINKLLDVSLEKGYCNLSAKALKRIIPHLEDGLTYDRAALEAGYNHSQPDQLKEVQDLLPEPENLRNPIVQQTLFELRKLINNLFNTYGKPEIARVELLRELKSSREQRQNIQKEMRIREKEIARARDRIKEIPEYLGKEPSRDDIVKYLLWEECKGICPYTGNHIPLSSLFTGEYHVDHIIPYSRSLDNSFANKTLCHHSTNIEKGNRTPYEAYASDPVRWNEIVQRVTSTMRHKLRKFLLTDVAAEVDDDFFHHQMTDTAYISTEVNKYLKNVCPKVQITKGGATAILRQLWGLNTILSPSINIKTRDDHRHHAIDALVIANVNPGTLHRLSLFHKFNKNVPHENFPEPWPNFRNNAEEVINKILVSHRRNVRVRGKLHEETYYGKITAPDNGRETYVVRKPLAGLTPKMIVNIVDPVVKKMLINRLIEKGVDVGEKFTIPKDAWNQPLFMPDGKTPIKSVRVKCPTETMIRLYQDRKLFVESGNNHHLEIFVNPETGKRIGRVVSLFEATKRLKQKLPLIDKTAPVPDYKFLMSLAINELILVDISDIDWDNPPPSTELSPYLYRVQKMDVNQIITLRHHTVSILKDETGNEPGVLRKNINTINGIKVSINHLGKIRKADD

SEQ ID NO: 9334 - protein, 999 aa, synthetic construct
  REGION 1..999: note = Synthetic
MAKVLGLDIGTNSIGWALIDDEKSKIVDTGVRIFQEGVNRTTSGSEESKNADRRIARGIRRQNARYRSRRDDLIVSLIKLQMYPKEKDEEANFYKIDPYEIREKGLDEKLTLLEIGRALFHINQRRGFKSNRKTATKEKGKIYDGKGEIAGITETAKAISEESYRTLGEYLAYLDPKEKRRRNRYTLRSMYSDEFNILWEKQRQFYPEILTDDAKNCIYDAIFFQRKLKSQKHTIGYCTFEPKKRCAPKSSPVFQYYRILEQVSRLTITTDNRFGEKLTDDERFLLTNELNERSELKFSRIKKILKLPPDSYFNLEQQKKLLGNRTGYEFAKAFGKKCWFSFSPEKKHEIWHTLHFSNDDEWLKKYASEKWGLDSNSVEKLMKVSLENGYARLSSKAMKNIIPFFEEGMAYDKAALEAGYHHSQTFKNRGNMEKLPEPENIRNPIVQQALYELRKVMNEIIEKYGKPNVIRVELLRELKLPKEKRENILLDNRRREKKANEIRARLKEELGFLNPSREDIQKYLLWEECNKICPYTGKQISLAGLYNGDFEIEHIIPYSRSLDNSMANKTLSLKELNLEKGNKTPFEAFSGDSERWDEIKQRVKKNMPWKLKKFTIEDAAEEIDDDFFHHQFTDSAYIAGEVHKYLKYICEKVQVAKGSATFQLRHLWGLDKILSGDINIKNRDDHRHHAVDALVIANITPGFLKKLSTYSKFGYEATHEKFPVPWENFRKYAGSSINNILVSHRVNKRVRGKLHKDTFYGKIRLRNGKETYVVRKPLKSLTPNMIKNIVDPVVRKTVLKRLRSMGLDTNKKYSIPKDAFTETLTMQNSSVSIKSVRVAITSGNMIRLYPDRNLYVEPGKNHHIEIFENETTGKRDGRVVTLFDAVKRKKEGLPIVDKNPLGKGYKFIMSLAINELVLIDLNYKNINWNDQTSSQELSKKLYRVQKISESTQITFRHHKVAVRKDEEGNEPGICSFVPNTLKGVKIKISPLGKIRMADD

SEQ ID NO: 9335 - protein, 970 aa, synthetic construct
  REGION 1..970: note = Synthetic
GVRIFQEGVNRTTSGSEESKNADRRIARGIRRQNARYRSRRDDLIVSLIKLQMYPKEKDEEANFYKIDPYEIREKGLDEKLTLLEIGRALFHINQRRGFKSNRKTATKEKGKIYDGKGEIAGITETAKAISEESYRTLGEYLAYLDPKEKRRRNRYTLRSMYSDEFNILWEKQRQFYPEILTDDAKNCIYDAIFFQRKLKSQKHTIGYCTFEPKKRCAPKSSPVFQYYRILEQVSRLTITTDNRFGEKLTDDERFLLTNELNERSELKFSRIKKILKLPPDSYFNLEQQKKLLGNRTGYEFAKAFGKKCWFSFSPEKKHEIWHTLHFSNDDEWLKKYASEKWGLDSNSVEKLMKVSLENGYARLSSKAMKNIIPFFEEGMAYDKAALEAGYHHSQTFKNRGNMEKLPEPENIRNPIVQQALYELRKVMNEIIEKYGKPNVIRVELLRELKLPKEKRENILLDNRRREKKANEIRARLKEELGFLNPSREDIQKYLLWEECNKICSYTGKQISLAGLYNGDFEIEHIIPYSRSLDNSMANKTLSLKELNLEKGNKTPFEAFSGDSERWDEIKQRVKKNMPWKLKKFTIEDAAEEIDDDFFHHQFTDSAYIAGEVHKYLKYICEKVQVAKGSATFQLRHLWGLDKILSGDINIKNRDDHRHHAVDALVIANITPGFLKKLSTYSKFGYEATHEKFPVPWENFRKYAGSSINNILVSHRVNKRVRGKLHKDTFYGKIRLRNGKETYVVRKPLKSLTPNMIKNIVDPVVRKTVLKRLRSMGLDTNKKYSIPKDAFTETLTMQNSSVSIKSVRVAITSGNMIRLYPDRNLYVEPGKNHHIEIFENETTGKRDGRVVTLFDAVKRKKEGLPIVDKNPLGKGYKFIMSLAINELVLIDLNYKNINWNDQTSSQELSKKLYRVQKISESTQITFRHHKVAVRKDEEGNEPGICSFVPNTLKGVKIKISPLGKIRMADD

SEQ ID NO: 9336 - protein, 998 aa, synthetic construct
  REGION 1..998: note = Synthetic
MSKILGLDLGTNSIGWTIIDDKKEEIVHTGVRIFQEGVNRSATGSEISKNADRRLARGIRRQNFRFKRRRDELIEKLIQYGMYPESDDSIEEYFKDDPYKLRAKGIDEKINLLEFGRVLYHLNERRGFKSNRKTNTKDDSKIYSGKDNTAGITDTENAIKSGKFRTLGEYLASLNPHEQRIRNRYTLRRMYQEEFELLWNKQKEFYPGLFTDEIKNDIYDTIFFQRKLKSQKHTVGYCTLEPKKRCIPKSSPVFQYFRILEQVSRLKVTTENRTNDPLTEDERFVLIKYLEIYKDRTFDQIKKKLNLATDCYFNLEHQNKLFGDRTSSDLSRVFTKSGWSQLSPEKKYEFWHTLHFSDDDEWLEKYAREKWNLDEKAIENLSKISLEKGYARLSHKAINKMIPYLEEGLTYDQAALKAGFHHSKINLSDTLRDFLPEPENIRNPIVQQTIYELRKVVNDIIQKHGKPDITRVELLRQLKLSKKRRESIHLDNLKKKRKNEEIRNRIAEEFPFIPSREDIQKYLLWEECNKICPYTGKYISLAALYNGEFEIEHIIPYSRSLDNSMGNKTLCYKGVNLEKGNKTPFEAFSGNQKRWDEMCQRVYKNLKRKYSRFTIEDAAKEINEDFFEHQFTDSAYIAREVFNYLKMICKKVQVSKGLATAQLRHLWGLDKILSGAENIKNREDHRHHAIDALVIANISPTSLKNLSNYHKSGKTAVIDKFPIPWTDFRTDALDSVNNILVSHKVNKRVRGKLHEDTFYGKIKTKDGKEHFVVRKPLTSLTPKNVENIVDPVIRKTVLKRLREYGVNTETKFKIPKEAFVEPLTMPTGNTKIKSVRVLIPTQNMIKLYDDRELYVEPGKNNHIEIFRNDKTGKQTGRVVSLFEATQRLKNHKPIIDKTPPAEGYSFLMSLSINELVLIGFNENDIDWNNPPDSTVISSHLYRVQKMDINNILTFRHHIVSVIKSESENEPGRIIKRIGALNTIKVRVDSLGNIRKYND

SEQ ID NO: 9337 - protein, 993 aa, synthetic construct
  REGION 1..993: note = Synthetic
MSKILGLDLGTNSIGWAIIDNEKNSIVNSGVRIFPEGVNRTTSGSEVSKNEDRRNARSIRRQNFRFKQRRDELVSKLQKYKLYPENDSELGEYFLKNPYSLRKKGLDEKLTLLELGRILYHLNERRGFKTNRKINDKQESKIFTGKDEVTGIIDTQKAINDNNFRTLGEYLASINTDTKRIRNRYTLRKMYKDEFEVIWNKQKEYYPEILTSEVKDDIYDTIFFQRKLKSQKHTVGYCVLEPKKRCIPKSSPIFQYFRILEQVSRIKITTKTRTNEPLNEDERFALIKYLDESKERDFKQIKKKLGLPEDCHINLEQQDKLYGAKTNYDLKKVFGKTVWEKLTPEKRQEIWHTLHFCDDSDWLADYANEKWHLNNNQIDKLLKISLESGYARLSRKAIMSLIPFLEQGMTYDKAAREAGYHHSIINRNETLRDFLPKPENLRNPIVMQTLYELRKVVNEIIRQYGKPDIFRVELLRDLKISKKRRWEITIENHKRKQKNEKIREILIKEFGFSPSREDIQKYILWEECNKICPYTGKSISLAALYNGDFEIEHIIPYCRSLDNSMRNKTLCYKSINLEKGKKTPFEAFSGDAERWEAMCQRVYKNLRPKYSRFITEDAATEINSDFFEAQLRDSAYIAREVYNYLKTISKKVEVTKGMATSQLRHLWGLNDILSDNYDLKNRGDHRHHAVDAIVIANTNVSTLKKLSIYYKYDREIQNQAFPMPWKHFRKDAENSVNSILVSHKVNKRVRGKLHEDTFYGKINLPDGTKTYVVRKPLAALTPKNILNIVDPVVQKTVLKRLHEMGVDTSGKFTIPKDAFAEPLYMPGKKAQIKSIRVKIPATNMIKLYTDRKLYVEPGKNNHIEIFINPENGRKTGRVVSLFEASQRLIKHHPIVDRTPPKDGYKFLMSLSTNELILANIDPDAIDWENQNKEKLSRHLYRVQKISVNQQITFRHHLVSGVKEDTGVLRKNPSVLNAIKVRIDTLGNIRKHRD

SEQ ID NO: 9338 - protein, 998 aa, synthetic construct; identical to SEQ ID NO: 8791
  REGION 1..998: note = Synthetic

SEQ ID NO: 9339 - protein, 974 aa, synthetic construct
  REGION 1..974: note = Synthetic
MMSPGVAEPLTILGLDIGANSVGWVLIDRQEEEGPGRLKDAGVRVFEAGMNLPEESEKEASHNVERRQARQRRRLLERRRMRLYAVRRTLQDHGLLPPGDPRYDAAFKQWLSQTDPYTSRAQGLDARLEPHQIGRAIYHLAHRRGFLSNRRAPEKKDEKPKVLQKAIGHLEDEMKSAKARTLGEYLSRIAPPERRRSQYTLRKWLQEEFDKLWKSQQGHHPGLLTPELKQKIRDKIFHQRPLKSVARLVGTCELERGRKRAPRALLLAQRVRLLQEVNNAQVSIEGCPRRRLTHDERKKLVKALETSAELKFAKVKEILGFPQSVTFNLDRAGKKGFVGNKTAARLIEIFGKKGWDQLYSRDRDIVVEGLLTIQKEGDRGRDEIVKEWGKRRWSLAEEQAEALADVALEDGYPHHSVQAMDKLLPHLEAGLTHPEALERAYPDPAAATAVDRLPHAPKLRNPIVERALAETRKVVNSLIHRYGKPARIRIELTRDLKRTSREREKIWKGQSQRERERQRAEKAIANEIDRQQPSRDDIERYRLWEECNHQCPYTGRQINMADLFHESRFDVEHIIPLSRSMDNSFLNKTLCEAQCNRERKRNKTPWEAFGETSAWEDIIARVERFKADEETKKAKRRRFEMKQVDDEFTAQQLNDTAYASRMARDYLARLYGNQWKKCVEVSRGRVTAYLRRAWGLETILGAKPDEAAAETRRGKARDDHRHHAIDAAVVALTTLGAVHALSNAAKQEIPGKARFRPILPPWEGLVQQVRDAVEKMIVSHRPERRVSGQLHKETFYGFVTDPRTGQKRAVVRKRVEALTRHEIKKKEIVDPTVRAAVEARLEVLRNQDPKNAFKNPSDHPTLRTRKGCEIPIHRVRVFQAVKPKTIGSGISERRVALANNHHLEVFEKPDGSWMGEVVTMLEAMRRKKTGEPIIRRQDNEGRRLLFSLSRGEAVQINTGTGERVTAVVQNISGP

SEQ ID NO: 9340 - protein, 1031 aa, synthetic construct
  REGION 1..1031: note = Synthetic
MMSPGVAEPLTILGLDIGANSVGWVLIDRQEEEGPGRLKDAGVRVFEAGMNLPEESEKEASHNVERRQARQRRRLLERRRMRLYAVRRTLQDHGLLPPGDPRYDAAFKQWLSQTDPYTSRAQGLDARLEPHQIGRAIYHLAHRRGFLSNRRAPEKKDEKPKVLQKAIGHLEDEMKSAKARTLGEYLSRIAPPERRRSQYTLRKWLQEEFDKLWKSQQGHHPGLLTPELKQKIRDKIFHQRPLKSVARLVGTCELERGRKRAPRALLLAQRVRLLQEVNNAQVSIEGCPRRRLTHDERKKLVKALETSAELKFAKVKKILGFPQSVTFNLDRAGKKGFVGNKTAARLIEIFGKKGWDQLYSRDRDIVVEGLLTIQKEGDRGRDEIVKEWGKRRWSLAEEQAEALADVALEDGYAHHSVQAMEKLLPHLEAGLTHPEALERAYPDPAAATAVDRLPHAPKLRNPIVERALAETRKVVNSLIHRYGKPARIRIELTRDLKRTSREREKIWKGQRQREWERGRAEKAIANEIDRQQPSRDDIERYRLWEECNHQCPYTGRQINMADLFHESRFDVEHIIPLSRSMDNSFLNKTLCEAQCNRERKRNKTPWEAFGETPAWEDIIARVERFKADEETKKAKRRRFEMKQVDDKFTAQQLNDTAYASRMARDYLARLYGNQWKKCVEVSRGRVTAYLRRAWGLETILGAKPDEAAAETRRGKARDDHRHHAIDAAVVALTTLGAVHALSNAAKQEIPGKARFRPILPPWEGLVQQVRDAVEKMIVSHRPERRVSGQLHKETFYGFVTDPRTGQKRAVVRKRVEALTRHEIKKKEIVDPTVRAAVEARLEVLRNQDPKNAFKNPSDHPTLRTRKGCEIPIHRVRVFQAVKPKTIGSGISERRVALANNHHLEVFEKPDGSWMGEVVTMLEAMRRKKAGEPIIRRQDNEGRRLLFSLSRGEAVQINTGTGERVTAVVQTISGPNPGKVDIEFRRHSDARKAEDVRKAGDRIRVSSYADLKQREARKVLLTPLGEIRWAND

SEQ ID NO: 9341 - protein, 1031 aa, synthetic construct
  REGION 1..1031: note = Synthetic
MMSPGVAEPLTILGLDIGANSVGWVLIDRQEEEGPGRLKDAGVRVFEAGMNLPEESEKEASHNVERRQARQRRRLLERRRMRLYAVRRTLQDHGLLPPGDPRYDAAFKQWLSQTDPYTSRAQGLDARLEPHQIGRAIYHLAHRRGFLSNRRAPEKKDEKPKVLQKAIGHLEDEMKSAKARTLGEYLSRIAPPERRRSQYTLRKWLQEEFDKLWKSQQGHHPGLLTPELKQKIRDKIFHQRPLKSVARLVGTCELERGRKRAPRALLLAQRVRLLQEVNNAQVSIEGCPRRRLTHDERKKLVKALETSAELKFAKVKKILGFPQSVTFNLDRAGKKGFVGNKTAARLIEIFGKKGWDQLYSRDRDIVVEGLLTIQKEGDRGRDEIVKEWGKRRWSLAEEQAEALADVALEDGYAHHSVQAMEKLLPHLEAGLTHPEALERAYPDPAAATAVDRLPHAPKLRNPIVERALAETRKVVNSLIHRYGKPARIRIELTRDLKRTSREREKIWKGQRQREWERGRAEKAIANEIDRQQPSRDDIERYRLWEECNHQCPYTGRQINMADLFHESRFDVEHIIPLSRSMDNSFLNKTLCEAQCNRERKRNKTPWEAFGETPAWEDIIARVERFKADEETKKAKRRRFEMKQVDDKFTAQQLNDTAYASRMARDYLARLYGNQWKKCVEVSRGRVTAYLRRAWGLETILGAKPDEAAAETRRGKARDDHRHHAIDAAVVALTTLGAVHALSNAAKQEIPGKARFRPILPPWEGLVQQVRDAVEKMIVSHRPERRVSGQLHKETFYGFVTDPRTGQKRAVVRKRVEALTCHEIEKKEIVDPTVRAAVEARLEVLRNQDPKNAFKNPSDHPTLRTRKGCEIPIHRVRVFQAVKPKTIGSGISERRVALANNHHLEVFEKPDGSWMGEVVTMLEAMRRKKTGEPIIRRQDNEGRRLLFSLSRGEAVQINTGTGERVTAVVQTISGPNPGKVDIEFRRHSDARKAEDVRKAGDRIRVSSYADLKQREARKVLLTPLGEIRWAND

SEQ ID NO: 9342 - protein, 1054 aa, synthetic construct
  REGION 1..1054: note = Synthetic
MASLALGLDIGSSSVGWALVSLRDGAPEGLVGLGARIFEPGVVGSVEQGREESRNLKRRQQRQQRRQTGRRRARLRSVYRVLAEAGLLPALEHGRPWHLQIHEALESVDARLRAKHLAQGDHLGQQVLFYRLRAKALAEPLEAHELGRVLYQLAQRRGYRPHRQAEASAKDDDEELGQVKAGIEELQRRMSVEGQPTIGALFSTFDPDAERIRGPGRWTSRDWFRDEFKAICAAQKVHHAGLTPEVEDKLSPAIFHQRPLRSQAGLVGRCELEPGHVRASLARLEVQQFRIVQTVNNLRVLEEGREQRSLTAQERAMLRAGLDAQDSMTPTKIKQLLGLPARKARLNVELRAESGEAGKIPGNRTASRLRRVLSNRWDAMDEAAKATLVEDLLSIRDPDVLRRRLMGPAHGLDDTLARRVADVRLESGRAAISLKAMRHLLPVMIDDGTSFAEARMRLYGKDVKPPLPLLPPVDKDFPQLRQPTVHRALSEVRAVVNALVRKHGKPDVIRIELARDLKHPRAVREAMWKRIEARRREREGFARKILEQNAQQTGANIERWELAVECGFQCPYTGRSFSAQDLLSPASPLQVEHILPYSRTLDNSFENKTLCFRDENARKHNRSPWEAYGGTAQYDELIRRVREFKGSDKRTKASKLDRFLRQTLAGDIEEEFSARQLSETRYATRLAAEYVGKLFGGAGGVDDEGRLRVQTSAGGATAILRREWNLNRVLGLDGEKNRAHHGHHAVDAVVVALTDRRAVHEIARAAMDAAASGSTRRLRPIPLPWTSLEKDVRKAIDGLVVSHRTSHRLRGGLHQETNYGMSPGGATGVVRIRKEVQRLAAKDVARIADPGVRRAVEEKLRELGAESPAEAFKGAGTLPALKTRSGSSIPIKRVRLEVKKTTVAVGSHVARRQRLNEPGSNHHMAVVETVGHEGRPVRWEDHVVSRFMATERQRRGEPVVQQDWGPDRRLVFTLAAGDSVGRQKDDASWELRVVKAVSAGVVEMLANTDARSTRAIRTEGAAGGRFKLGAERLRLEFWQKVTVSPIGEVAPARD

SEQ ID NO: 9343 - protein, 1045 aa, synthetic construct
  REGION 1..1045: note = Synthetic
MAMKKAVEELALGLDIGANSIGWSLIAFANGKPERIVRAGVRCFEAGVEGSMEAGRDQSRAKRRGLARRQRRQTERRAWRLEKAARLLQRAGLLPEGPIATAEDRLKFFTELDERIVSSYLKKVSADDPDRRRLAHVVPYALRARALDKRLEPHELGRALYHLAHRRGFKSNRRGGEEEKKETGKVKKAFSQLHRDMQEAGARTLGEYFAGLDPEKGRIRTRYTSRPMYLDEFDQIWNSQSGFHPSILTDGFKRQLHRAIFYQRPLRSQKGRVGNCELERGCRRAPKACFEFQRTRILEQVNNLRVVSFRDGIGRPLNETQRRTLISELGKKRELKLDRVRAILDLPETGYMLNLEEGEQNKLVGNKTAAALTKVFGRTLWHKFSDAERDRILEDVRSIEDDEVLKRRATEVWGLDEQKGQKLCNVGLEPGYCALSRKALKKILPGLEKAKSRTEVLQEIYGHQTVGVHQDLPSVEQSGILVMNPAVHRALTELRKVVNAIIREYGKPDRIRIELARDLKQPRKERMVRSKRMAANRAARDEQKEYIKEQTGNEYPSKEDVVKLQLAKECGYVCPYTQLPMSRARLLGHSAEFEIDHIIPISRCLDDSFANLLLCHVEANRKKGNRTPFEAFGDTPDWERILGRVRKFTGHLKSEKLRRFQLTEDQVIERFGEFAARQLNDTRYTTKLAGRYLSLLYGGRSGVQGIRGIETTKGAITNHLRNAWELNRILSDGPGKSRNDHRHHAVDAIVIALTDPGMVKRLSNAAERSSATGHRRWWREVEPPWDGFVSDVRETIHGVVVSHRVSRKVKGPLHEETYYGHKEGSEYVRLRKPLGSGKGKLSQTEIPDIVDDAIRQRVQLKLEELGEPDPKKAFKSPENHPFLQTLDGGRIPIHRVRLKKKAAVIPVGDGVRRRHVMTGRNHHVEIVETTDNKGNVRWEDHVVTLYDAVQRHKAGRPIVKRDHGRGKKLVFSLSLKESVRMKNQQGDWILARVVGISKNDIEFRENRDARSDTEIRKAGYGRIRCSAEKLRKHEPQKMLITPAGE

SEQ ID NO: 9344 - protein, 1039 aa, synthetic construct
  REGION 1..1039: note = Synthetic
MKNDAEQHILGLDIGATSIGWALVALQDGAPQRIVRAGVRCFQAGVEGDVESGRDESRARKRREARLARRQTERRTRRMGKVARRLQQAGLLPDGPIDAGEQRLKFFTELDRAIASRYLSAVPEGSPERRRLAHVIPYKVRAAALDERLEPHEIGRALYNLAHRRGFLSNRRAPLKTDEKPGVVKENITKLGEEMRKAGARTLGEYFAGLDPEKERIRARWTSRKMYLEEFERIWEKQSEFHPSVLTDEFKNELHRAIFYQRPLKSQKGRIGECQFERGHRRAPMASLEFQRFRMLQKVNDLLAVSKTDGVVRALTSDERDKLIAELDTKDKVTFGRVRTLLGLRGWTFNLESGGEKSLIGNKTAAALANFFGARWSAFSDADRERIIGDVRSIQKEETLKRRGMEVWALDEGAAEALSNVRLEDGYCGLSRKALRKILPSLEGGQSYSKVVKDVYGERERPVLEYLPSVNQSGIVVLNPAVRRALTELRKVVNAIIREHGKPDKIRIELARDLRQPRKERKQRSDRMRSNEAARNEARRRILQETGDSSPSRTDILKVQLADECNWECPYTGRQINWATLLGAEPQFDIEHIIPYHRCLDDSFVNKTLCEVAENRNVKKNRTPFEAYAGTEHWEEIVQRVTEFQGRLGSEKLARFCLEDLTEFEDFSSRLLNDTRYTSTLAADYLACLYGGLWDARAIRRIHATKGGITAQLRNAWKLNGILGDGPGKSRDDHRHHAVDAIVVALTDANMVKRLSGAAQRSFAKGERRWWNYVDEPWEGFLGHATGAIDGIVVSHRVSRKVTGPIHEETYYAHKEGSAYVHVRKALKDLSKKEIEDIVDDRVRECVRDKLAGGDPRKAFKLPENEPVMLARDGRQIPIHRVRIRKKASVETVGKGVRQRHVLTGSNHQVEIVETTDAKGSVRWKGYVVTTYEAMRRLKNGEPIVRRHHGAREKFLFSLALKDAVRMEGKDGDYIIWRVSTISEFTNGTVQLCFVPNADARPVTKIPREGRTRTPDKMREARCEKIAVTPLGEVRRAND

SEQ ID NO: 9345 - protein, 961 aa, synthetic construct
  REGION 1..961: note = Synthetic
MGKIARRLQQAGLLPEGAIGTGEERLRFFTELDRSISSRYLSAVPEAGPERRRLAHVIPYKLRADALDERLQPHDLGRALYHLAHRRGFLSNRRAPLKADEKPGVVKQNITKLGEEMQEAGARTLGEYFAGLDPEEQRIRARWTSRKMYLDEFERIWEKQSAFHPSILTEEFKKELHDAIFYQRPLKSQKGRVGECQFERGHRRAPMASLEFQRFRMLQRVNDLLAICKADGVVRALTSDERDTLIAELDTKEKVTFGRVRTLLGLRGWTFNLEAGGEKNLVGNKTGAALAKVFGAQWSAFSDADRERIIGDVRSIQKDETLKRRGIGVWGLDEEAAEALSNVRLEDGYCSLSRKALRKILHALEKGESYSKVVKNLYGDRERPVLDYLPSVNQAGIVVSNPAVHRALTELRKVVNAIIREHGKPDKIRIELARDLRQPRKERKRRFDQMRSNEVVRNEARRRILQEAGDSSPSGTDILKVQLADECNWTCPYTGRQINWGTLLGSEPQFDIEHIIPYHRCLDDSFVNKTLCEVAENRNLKKNRTPFEAYAGTERWEEILGRAAEFQGRLGSEKLRRICLEDLSEFEDFSSRLLNDTRYASTLAADYLAPLYGGLSDAAGVLRIHATKGGITAQLRNAWKLNGILSDGPGKSRDDHRHHAVDAIVVALTDANTVKRLSKAAERSFARGERRWWNYVQQPWDGFLEEATQAIERIVVSHRVSRRARGPLHEETYYAHKEGSAYVHVRKALKDLSKKEISDIVDDKVRECVRNKLAGGDPRKAFKSPENDPVMKARDGREIPIHRVRIRKKASVEAVGRGVRQRHVLTGSNHHVEIVERADAKGGVRWKGYVVTTYEAMRRLKNGEPIIKRDHAAREKFLFSLALKDAVRMQGKDADSIVWTVSTISEFTNGTVQLSFVPNADARPVTKVPREGRTRTPDRMRTARCEKIAVTPLGEVRRAND

SEQ ID NO: 9346 - protein, 1047 aa, synthetic construct; identical to SEQ ID NO: 8585
  REGION 1..1047: note = Synthetic

SEQ ID NO: 9347 - protein, 747 aa, synthetic construct
  REGION 1..747: note = Synthetic
LNSNHARNLLVGLDIGPASVGWAIFETDATGRAASILHCGVRIFDAGTEGDISSGRDASRNTARQEAKSRRKLLERKAMRKTHLMRVLERIGLLPELTNHSPNERNKGLCNLDESLRDEFYRLHPEYLNAENGGCRLFPYHLRAIGLRERLAPFELGRAIYHLAQRRGFWSNSRKTPADKDEGEVKAAIHSLRVKMGDLRLGEYLARTGGNIPKGPESRIRGQKLHRDMLQDEFTALWHCQAQFHPALLNKECYDDVWKAIFWQRPLKSAKHLVGFCTLEKRSRRTPLCTLEAQRFRLLSKLNNLEAISNHGEVVTPDDTQRARLLEHLEKEGDLTFIKARKLMGLNKDWQFNLERGGEKKMEGDRTSAKLRALLGDAWDALPLEKRSRLVLLVYATNKEAILTRVASRDYGLAPETAAALATIRLEEGYLSHSRCAVMKLMPHLEKGVPYATARKIEYGADAPPPLHDCLPPVAIALPGIRNPMVTRTLTEMRRVVNAICDRYGKPAIIRVELARDLKRSRKDRMSFTKNMRSREKERNTAYAGLLEMFPGLGLQQRTAVLKKLLAEECGWQCPYCGEMFSPADVFGPHSSVDIEHILPRSRSLDNSFLNKTLAHNACNIKKGNRTPFEAYGADTEVFEAMLERVRRFHCDVGAKKAKLHRFEVPDMAAEFADFTNRQLSDTRYASKLALEYLGQLYGSDAAKRVRASSGGVTALVRDMLGLNFILGRGEKSRADHRYHAVDAIAV

SEQ ID NO: 9348 - protein, 1041 aa, synthetic construct
  REGION 1..1041: note = Synthetic
MDSIHSRNLLVGLDLGPASVGWAIFEADAAGKAASILHCGVRIFDAGTVGDISSGRDASRNTARQEAKSRRKLLERKAMRKTHLMRVLERIGLFPELPNHSPTERHKGLCNLDESLRDEFYRLHPEYLNENNGGRRLFPYHLRSIGLHERLTPFELGRAIYHLAQRRGFWSNSRKTPTDADEGEVKAAIRALRVKMGDMHLGEYLARTGGNIPKGPESRIRGQKLHRDMLQDEFTALWHCQAQFHPALLTKDCYEGVWKAIFWQRPLKSAKHLVGFCTLENGSRRTPLCTLEAQRFRLLSKLNNLEAISNQGEVATPDVTQRACLLEHLEKEGDLTFVKARKLMGLNKDWQFNLERGGEKKMEGDRTSAKLRALLGDAWDALPVEKRSRLVLLVYATNKEAVLARVAARDYGLVPETAAALATIRLEDGYLSHSRRAVLKLMPHLEKGVPYATARKIEYGADAPPPLHDRLPPVAIALPGIRNPMVTRTLTEMRRVVNAICDRYGKPASIRVELARDLKRSRKDRMSVTKNMRAREKERNQAYADILEMFPGLGLQQRTAVLKKLLAEECGWQCPYCGEMFSPADVFGPHASVDIEHILPNSRSLDNSFLNKTLAHNACNIKKGNRTPFEAFGADTEAFEAMLERVRRFHCDIGAKKAKLHRFEVTDMAAEFADFTNRQLSDTRYASKLALEYLGQLYGGDAAKRVRASSGGVTALVRDMLGLNSILGRGDKSRADHRHHAVDAIAIAMTDQGMIQRIARAAEWAASHRERLSKAPFHGAWEGFIDTAKDMIMNIAVSLRHRRKVSGQLHDQTFYSRRGERLSIRKKLEKLSPQEVDRIIDPYIRELVKSRLDALGLKDPAKAFAADANAIFLKRLGGTQVKKVRVFVSGKAETIGKGVRARTVMTDGNHHMAVYESLDKKGQPVWKGDVVTLMEAKRRTAKGLPPIIHDAPELGRFLFSLTSGDIIALTEGEGERLWRVRSVWLAGSSARLRLSPLHDARPEKEIRKDGLNPEPMINKLREKACRKVTVTPMGEIRRDNT

SEQ ID NO: 9349 - protein, 960 aa, synthetic construct
  REGION 1..960: note = Synthetic
LDIGSASIGWALADIAGATIAAAGVRIFPAGVDLAQWEQGREGSSNNTARRGKRLQRRQFRRRAGRQRDLFLALQNAGLLPPAVREEGAPGRSAARHGVLSALDEALRTRWAARMAADGVPAPEQVLPYYLRATALDEPLPPHALGRAVYHLGQRRGFLSNRRELNGKSGDKQKEADERSKVKGGIAGLRAEMEASGARTLGEHFSRLDPAAARLRTRWTARDMFQREFGQIWERQAPHHAQLTPALRKRLERILFHQRPIAAGSPGACELEPGAKRAPMASWYAQRFRLLQKANDLRSVAPDESEYPISAAERAALIAALEAEGDLTFAEIKRRKLVALPKGYQFNLQRGGEKKIPGNRTNAILARLFGTPWGQCSPEVRDRIVSQWLDSNLDDQALERLWGRSADLQFVGEIDWDKTQPEDGYAKLSLKAMHKLLPLMENGMAFKTAEQEVYGDRRSDPVAVLPPVEKALPAIANPCVTRALTELRKVVNAIVREYGKPWEIRIELARDLKRNAEQRLQLSNSMRTREKERKRAAQQIVAEAGFSMAGPGDIQKLLLWERGGKACPYCGESINGAQLFGEGQVEVDHILPRSRFPDDSFGNKCVAHTRCNREKRGRTPFEAFSGDLQRWEEILNRVRAWKDPGKLRAFECRAEDLDLDREDSFASRRLNETRYSTTQAAKYLGLLYGGRDADRGDGTRRRVIFATSGMATAVLRRGWELEAILRQPEPSANGKSRGKPRHDHRHHAIDAVVIALTSNATIQQLAVAAAAAAAETGSDRVSSRTLRAPWPNFADEVRQVIEPLLISHRPRHGLQGQLHDETNYSKPHGEFVHVRKPVHTITEKQIDKIVDPAVRQAVRAKIEAVGDPKKLEHDRPMLRTRAGRDVPINKVRLRAKPAASVRPIGSGAVDDTAKHHIALFAGRDKKGRDRWLGEVVSRFEAMQRKAQCHCPQGHRCECVV

SEQ ID NO: 9350 - protein, 1091 aa, synthetic construct
  REGION 1..1091: note = Synthetic
MSPHSRALPQAAKDWVLGLDIGSASIGWALIDPAGQRVAAAGVRIFEAGADERGFAEGREGSSNNTARRAARLHRRQLRRRAGRHRELFLELQRAGLLPAAEEGGRAGGSAARHAVLSRLDDALRPEWVERAAAAGVPAPEQVWPYFMRAWALDQPLPPFALGRVLYQLAQRRGFKSNRREAAGGATSNQVAADEKSKVKQGIATLQQEMTATGARSLGEYYSRIDPSAVPLRRRWTHRDMYRSEFALIWQCQSATEDRLTPELKERLEPLLFFQRKLLPAKPGKCELEPDHPRAQAAVLAAQRFRLLQKVNDLAVVLPNLEYQPLTADERHNLLLALEGEGDLKFTEIRRRRLVDCPRGAHFNLESGGETKIPGNRTAAALRPIFGERWDALADDQRESVVALWLAPEIEDDELARIGRQQYGLHDAAATAWAQAEPEPGYAKLSERALGRLLPLMEKGAPFKTAEKEIYGSGYSGGTAYDRLRPVADALPEVANPAVMRALTELRKLVNALVREYGKPGEIRIELARDLKRNAQQRAALAKSMRQRESERKAAKKAIEDLTEVNIPAPSAADITKRLLWERCGKACPYCGGVIGFSELFGGGADVEHILPRSRFPDDSFGNKCIAHRSCNTEKGGRTPLEAFSGDPERWAQMLERVRRWNDEGKLKAFQAGADELDPDREDSFAARRLNDTRYTTTLAARYLGQLYGGRDLARPDGTVRRVVFASSGLVTATLRRGWGLEGILRQPDASENGRSPGKNRDDHRHHAVDAVVVALSSNAAIQQLSRAAAASASATGVERISSRTLQGPWPDFVDRVRPAIEAINVSHRPQRKLAGELHQESNYSRPHLLGVVGFVHIRKPVHRLSAAQINAGDKIVDPAVRQAVQAKLAALGGEPKRLEHDSPVLLTRAGRSVPIRSVRIRAEKAASSRSIGTGERQRQVLLAGNHHLELFEGRDRRRRDAWKGQVVTRLEANARRARCRCGRGRPCDCVVTRKFEREEGYGFLFSLMGGDMIEMSEPGGAALRFVVRTISAYASGRIELALVAATNAAKVADVRAAGQFIRITDMNDLRKRGCRKIEVDPLGRVRAAGG

SEQ ID NO: 9351 - protein, 1091 aa, synthetic construct
  REGION 1..1091: note = Synthetic
MSPHSRALPHAAKDWVLGLDIGSASIGWALIDPAGQRVAAAGVRIFEAGADERGFAEGKEGSSNNTARRAARLHRRQLRRRAGRHRELFLELQRAGLLPAAEEGGRTGGSAARHAVLSRLDDALRAEWVERAAAAGVPAPEQVWPYFMRAWALDQPLPPFALGRVLYQLAQRRGFKSNRREAAGGATSKQAAADEKSTVKQGIATLQHEITATGARSLGEYYSRIDPFALPLRRRWTHRDMYRSEFALIWERQAATEARLTPELKERLERLLFFQRKLLPAKPGKCELEHDHLRAPAAALVAQRFRLLQKVNDLAVVLPNLDYRPLAADERQNLLLALEGEGDLKFTEIRRRRLVDCPRGAHFNLESGGETKIPGNRTAAALRLIFGERWDALADGQRESVVALWLAAEIEDDELARIGREQYGLDDAAANAWAQSEPEAGYAKLSARALARLLPLMEQGVPFKTAEKEIYGSGNSGGTAYDRLRPVADALPEVANPAVMRSLTELRKLINALVREYGKPGEIRIELARDLKRNAQQRAALAKGMRQRESERKAAKKAIEDLTEVNIPAPSAADITRRLLWERCGKACPYCGGVIGFSELFGGAADVEHILPRSRFPDDSFGNKCIAHRGCNTEKGGRTPFEAFSGDPERWAQILERVRRWNDAGKLKAFQAGADELDPDREGSFAARRLNDTRYTTTLAARYLGQLYGGRDEARPDGSLRRVVFASTGLVTATLRRGWGLEGVLRQPDASDNGRSPGKNRDDHRHHAVDAVVVALSSNATIQQLSRAAAASASATGVERISSRTLQGPWPDFVDRVRPAIDAINVSHRPQRKLAGELHQESNYSRPHMLGAVGFVHIRKPVHRLSVAQINAGDKIVDAAVRQAVQAKLAALGGEPKRLEHDSPVLLTRAGRSVPIRSVRIRAEKAASSRSIGTSDRQRQVLLAGNHHLELFEGRDRRGRDAWKGQVVTRLEANARRARCRCGRGRSCDCVVTRKFEREEGYGFLFSLMGGDMIEMSESGGAASRFVVRTISAYADGRVEMALVAATNAARVADVRAAGQLLRITDMNDLRKRGCRKIEVDLLGRIRGAGG

SEQ ID NO: 9352 - protein, 1069 aa, synthetic construct
  REGION 1..1069: note = Synthetic
MSRQTAPSCILGLDLGVSSVGWALLDRQQQRFVAAGVRIFESGMDARKFEKGEPGASNNVQRRGSRLHRRQLRRRAARQRELFERLQQAGLLPAEPRGGSAENRHRILTELDQRLAAKWRERIRKEGPAVVAPEHVLPYFLRARALDEALEPHELGRVLYHLGQRRGFKSNRREGRKAGAGKSEEDRGKVLAEIADLRQAMGAAGVRTLGEYLSRQDPAQPRAIRRRWTAREMFEQEFEAVWNAQAAFHPDTLRQTLKQNVHSLLFHQRPIQAGKPGMCELEPGCPRAPMATLAAQRFRMLQKVNDMAMVNGEGDRTELTTEQRRLLADRLEAEGDLTFREIRTLLGVPKTARFNLQAGGDKKLPGNRTAATMRRAFGEGWLSLPETEQKRIVRRWAETENLEELRRMAIKEWSLPEDRAGELAQTEPEEGYSRLSLKAMSKLLPLMGAGKAFKEAERQIYGKRFSGREAKDRLPPAEEVLPLIPNPGVLRSLTELRKVVNAIVRKYGKPTQVRVELARELKRSAKDRQALQEGMLKNRRLRAAAARRILQETGNPSPSRDDETKVLLFDELQACAYCGRSFSFGDLFNGQAEVDHILPLSRFPDGSLANKTLACVDCNRQKTGRTPYEAFGSDEGRWEQIQTRVKSMRSGDKRKRFLLRTAEELEEFSARHLADTRYVSKLAARYLEQLYGGRDEEVPWEDTNRRAVYASSGAVTATLRRAWGLEAILREAGPSSNGANAGKARSDHRHHAVDAMVVALTSQAAIQQLSAAAASGAAGRTERISSRTLQAPWPDFVDSVRPLIENLKVSHRPSRTLRGELHDETNYSPEKSWNGKKVWHVRKPVHGLTAKMVKDIVDVRVREAVEKKLGELGGLDNIKKLEHEPPALTTRKGHAVPIRRVRIRTRTQALAIGNGLRLRHVVPGGNHHIVLFETVGRRGREKGKVAWDSPGVVSRLEALRRYRAGEPIVQRALPAGEEGRFLFSLMGGDMVEMKHPDREERDLFVVRTVSEAASGAVELVFVRHTDARRVEEIKKSGDWIRITRLNELRDLGCRKVMVDTLGKVRSAHD

SEQ ID NO: 9353 - protein, 1091 aa, synthetic construct
  REGION 1..1091: note = Synthetic
MYCLPLARVKEDVVPSERSSPFVLGLDLGVSSLGWALLDPRNQSFAAAGVRIFNSGMDENKFERGEQGASNNVERRKARLHRRQLRRRAARQRDLFLALQEAGLLPAEPRGDSPENRHCVLENLDRRLTYTWAERIQAENPLIVAPQHVMPYFLRARALDYPLELHELGRALYHLGQRRGYRSNRREVRSLQDEEAGKSKKPKLPADDDDKQVLAEIAGLEVELASSGTRTIGEFLSRKDPALARIRTLHTARKMFEEEFEKIWAAQLPHHPGCLSTELKRVLHKLLFDQRAISAGKRGMCELERNCQRADMYTLAAQRFRLLQKLNDLAVIHLDDEKRPLSSDERLLLMQRLEEDGDITFEQARLMLRLPKRTRFNLAVEGDKRIPGNRTNAVMLQAFGDRWKTFGDSERKHMVRVWAEAEQAETLANIATQEWGLDAIAARKLANAEPEYGYCALSIHAISKLLPAMEQGEHFKTAETNVYGNRFSGNDAKDFLPPVEDVLPQIPNPAVMRALTELRKVVNAIVREHGKPAQVRVELARDLKRSARDRQRLADIAEDNRKRRARMVARIQAETGLRREPSGRDIEKGLLFEDLQECAYCGKPINFQTLFSDTPQFDVDHILPLSRFPDNSYANKILACNTCNATKTNKTPVEAFGPDAEMWDKIVMRVSRTRKTGKQERFALGEDKRRRFLLQNDDEVAEFSARHLADTRYISKLAARYLEELYGGRDRQVPWEDQRRRCVFASSGMVTYTLRKAWGLNSLLADAGSNHNEAEKNRGDHRHHAIDAMVIALSNQAVIQRLSSAAAMGDGRIVGRISSRTAPPPWGAFVDSLRPLFQGINISHRPDHKLNGALHDDTNYGWRKEGGKDCARLREAVSKAAGHANRIADPKVREAVMQKLEELGGKAEKLATNLPMLITRTGKQVPIKKVRVTVKNKPQVIAEGARQRYVALNANHHVCIFETKNSKGGVVWDSPGVVSRYEAMQRWKRQPIVQRNLSKGEEGRFLFSLMNGDVVEMDDVRAARSLYVVRGISDGEIDFVRHNDARKKDGLKKASDLSGDFVRARSIDRLREWNCRKVIIDVLGRIRNAND

SEQ ID NO: 9354 - protein, 978 aa, synthetic construct
  REGION 1..978: note = Synthetic
MTQLRTNSYTLGLDLGVSSLGWALLDASGRRFVSAGVRIFDSGMDENKFAKGEQGCSNNVDRRRARLHRRQLRRRAARQRELFITLQDAGLLSAEPRGGIPETRHALLQDLDRRLAESWGERIQADNPFIVAPQQVLPYFLRARALDHPLQADELGRALYHLGQRRGYKSNRREGRKLEDEQTREAKRKKQATAEQDEKRKVLAEISGLEVELAASGARTLGEFLSRQDPAAARIRTRHTARKMFEQEFEAIWLAQQPYHPECLTAELKQRVYKLLFHQRPISGGKRGMCELEKDCQRADMYTLAAQRFRLLQKVNDLLIVHADGARRELSPEQRRLLAQRLQEAGDMTFEQVRTLFGLPKKTKFNLAANGDRKLHGNRTNAAMLRAFGQRWGTFSEAERKHKVRRWAEGEHAEELQTIAIEEWDLDSAAAHQLANTEPEDGYCKLSLHAISKLLPAMEQGEAFKTAEAKIYGNRFAGREAQDSLPPVEDVLPQIPNPAVMRALTELRKVVNAIVREHGKPAQVRVELARDLKRSAKDRQRLTDIMEENRKRRAKVIARIQREAGINNPSGPSIEKGLLFEDLQECAYCGRTINFQNLFSDTPQFDVDHVLPHSRFPDNSYANKVLACNTCNDRKRNRTPYEAFGSDPEVWEKLVARVARRRGTGKQERFLLGGDKRKRLLLQTSEEVEEFSARHLADTRYISKLAARYLEELYGGRDQEVPWEDQRRRCVFASSGMVTATLRKAWGLNSLVPEAPGASKEGGPEKERCDHRHHAIDAMVVALSSQGAIQQLSAAAAAGDGRILGRISSRALQAPWPNFVDSIRPVFESLNPSHRPDHRLSGPLHDETNYSPPRAFHGKEYVHLRRPIHSLSAKDINSDHLIVDRKVKEFVQAKLADLGGDPKKLEHDPAVLITRTGKRVPIRKVRVREAKSVTRIAASPHARYVATNDNHHVAILAGLDAGGSEKRWDGELVTRLEA

SEQ ID NO: 9355 - protein, 1034 aa, synthetic construct
  REGION 1..1034: note = Synthetic
MECEITRYRLGLDIGSNSVGWAAVRVEDGKARGMLRCGVRIFPAGVEGSPEQIEQGREESRAAKRRQMRLMRRQTDRRRRRLKRVYGLLASWGLLAEGETSAARGRALEALDRELAARYPETSMPPYYLRARSLDHKLEPVELGRCLYHLAQRRGFLSNRKVRSRESEEDRGKVKRGISQLWAAIEASGARTLGEYLSRLDPHEERIRERWTHRDMFKQEFDAIWTSQAAFHPFVLTPQRRTELFQAMFHQRPLKPQTELIGKCELEPDQLRAPLWQPLCQRFRMLQQVNDLRLMDPAGAERALSSDERALLIGELEANGDLEWRRVRRLLGVGKAVQFNRERGGEKRLVGNRTAAKMRSVFHHRWDEMTSEEREEAASDLVGDLGEGELARKGVERWGLNELLAAEYADLELESGKYLSLSLRAISRLLPRMEGGEAFMSARKAEYPETFEVGPALDSLPPVVDGLPEIRNPAVVRTLTEVRKVVNALVREYGKPEEVHIELARDLKRPRSERERRADRMRQQQKRREEAVKKIQAEGGPGEPSGAGVQKMLLAMECRFQCPYTGRQFGYKSLESGEVQLEHIIPFSRSLDDSFLNKTLCFVDENKRKGDQTPWEYYGRAGHPEWENILERVKKFDSPLATQKLRRFQMREEELERLLGDFSSRQLNDTRYASRLAARYVGLLFGGRADQDHGQRVFVTGGEVTAYLRRLWSLESILGAGEGKTRDDHRHHAVDALVVALTGPVWVKALADAASRARAVGHRRFSSLEPPWDGFVSEVRDAVLRTVVSHRPDRSVAGRFHDETFYGLRDHRGQRSVASVRKAVWRLTADESDQILDPAVRDRVRLQVGILGGDPKKLKGRDNEPRLPTRDGREIPIRRVRVAVNKEVRAVGRGERERLVMGGEYHHAEVFAVLDKAHNVKKWDCALVSHQDAAERLRRNRPMVARDQGSDSRFEFTIHKNDTLEIGPEGRRRLVVVKGLEADKRVGVADVTDARPITTANRNRERYTVNQLMREHRCRKVVVTPLGEVVPCHD

SEQ ID NO: 9356 - protein, 1029 aa, synthetic construct
  REGION 1..1029: note = Synthetic
MASHIPYVLGIDLGSNSLGWAALRLDGRDACGLLASGVRIFPAGMAQLESGRDESPAAERRQARLQRRQTDRRRRRIQKIYNLLASYGLLPPAAESSGRIRLLRQIDGELSVKFGDSGRLPYLLRAAGLDRKLEPVEFGRAMFHLAQRRGFLSNRKAANPKAAKKPEKDQGEVRESISRLESEISAAGCRTLGEFLSRLDPAQTRIRGRYTSRAMYLREFESLWEAQAAHHPLVLTEERKRALLSAMFYQRPLRDQSELVGDCELEPQEKRAPVWHPLVQRFRLLQEVNHLRLVDGSGTPRPLDPEQRAAVLRALEDGDMTIKRFKKLLGLRGDVEVNLERGGKEKLIGDRTGAELRRAFLHRWDEMTEADRLEAITDLASDLDESSLEAKARDKWSLDPLHAEQYSNLTLEFGKYAGFSLKAICKLLPYLESGSDITSARLAAYPETGRTQVLDFLPPVQDHLKQIRNPAVVRALTELRKVTNALLRKFGKPDEIHIELATELKAPQREREARWKRMRQREKERGQAFERLLKEVGITRPSRADIEKLLLYEECGQHCPYTGKGISFRQLFHSGEVQVEHIIPFSRSLDDSFANKTLAYVDVNARKGQRTPREAFGGSPEWPDMLERVRAFRGDFARHKLHRFQWTTEEVAGLLADFTTRQLNDTRYASRLAGRYLSCLYGGLTDEGGNQRVYVSPGQVTAFLRRLWSVEGLLSAGGRKTREDHRQHLIDAVVVALTGPRWVKALSDAAGRARDEGRPRFASLEAPWEGFVADVRQSVERAVPSHRVDRKATGRLHAETLYGRIQHPRTGECTVVRKLVHRLSKKELEAIVDTRIRERVELQWGLCEGKSERLEADPPTLPASGGRAIPIRKVRIRIAETPRRLADGLRARNVIGGDYHHFEIIRRTHPRTGKIAWDFVPVGTQEAMERVRDKKPLVARDHGPGAQFVCSIAKGDTLEVRMDGEPRLVIVRVLEGTTGKVALQGLNDARPFGTIDRKGLRPAVAVLMTKLAARKVTVSPLGEVRYAND

SEQ ID NO: 9357 - protein, 868 aa, synthetic construct
  REGION 1..868: note = Synthetic
HHPLVLTEERKRALLSAMFYQRPLRDQSELVGDCELEPQEKRAPVWHPLVQRFRLLQEVNHLRLVDGSGTPRPLDPEQRAAVLRALEDGDMTIKRFKKLLGLRGDVEVNLERGGKEKLIGDRTGAELRRAFLHRWDEMTEADRLEAITDLASDLDESSLEAKARDKWSLDPLHAEQYSNLTLEFGKYAGFSLKAICKLLPYLESGSDITSARLAAYPETGRTQVLDFLPPVQDHLKQIRNPAVVRALTELRKVTNALLRKFGKPDEIHIELATELKAPQREREARWKRMRQREKERGQAFERLLKEVGITRPSRADIEKLLLYEECGQHCPYTGKGISFRQLFHSGEVQVEHIIPFSRSLDDSFANKTLAYVDVNARKGQRTPREAFGGSPEWPDMLERVRAFRGDFARHKLHRFQWTTEEVAGLLADFTTRQLNDTRYASRLAGRYLSCLYGGLTDEGGNQRVYVSPGQVTAFLRRLWSVEGLLSAGGRKTREDHRQHLIDAVVVALTGPRWVKALSDAAGRARDEGRPRFASLEAPWEGFVADVRQSVERAVPSHRVDRKATGRLHAETLYGRIQHPRTGECTVVRKLVHRLSKKELEAIVDTRIRERVELQWGLCEGKSERLEADPPTLPASGGRAIPIRKVRIRIAETPRRLADGLRARNVIGGDYHHFEIIRRTHPRTGKIAWDFVPVGTQEAMERVRDKKPLVARDHGPGAQFVCSIAKGDTLEVRMDGEPRLVIVRVLEGTTGKVALQGLNDARPFGTIDRKGLRPAVAVLMTKLAARKVTVSPLGEVRYANDCPAAGLLRIAGIAEHRKRASGYPPAGPSRSDRAPCRHWRPRGQPPAGGFHPEPGGRTGQGRGAADLLR

SEQ ID NO: 9358 - protein, 907 aa, synthetic construct
  REGION 1..907: note = Synthetic
MEIQVAVPYVLGIDLGANSVGWAALLHEHGESVGILDLGVRIFAAGVTGLEAGRDESHAAARRVARLQRRQTDRRRRRIHKIYGILADYGLLPAKATPADRAKALSALDNELSARYGAHDNLPYVLRARALGEALSPFELGRALFHLAQRRGFLSNRKSTKEPDDEKGKVKSGITILAHAIAESGSRTLGEHLSRLDPHEARIRGRYTSRQMYLDEFDKIWESQAANHPELLNPERKRELLQAMFHQRPLRDQSDLIGDCELEEGEKRAPAWHPLAQRFRLLQEVNHLRLIDPAGVSRALSAEERQAVVPLLEKGDLPIRELRKLLEIKRNVEINLDRGGKKALIGDRTEEKMRGAFGAAWDALSQEEKLEAITDLAGDLGDTQLARKAQDRWGLSAEQAERYSSTSLEVGRYLGFSLKAIAKMLPLLESGADATTARDAAYPAGTFRTDLLGALPPVAERLKDLRNPAVLRSLTELRKVVNALIGRYGKPLEIHVELARDLKASRPEREDRWARMRRNEKARAEAAAKIQSEIGIHTPGRADTEKWLLAEECHWRCPYSGRGFSATQLYQSGEIQVEHIIPFSRSLDDSFANKTLAYSWVNKAKGNRSPREAFQEQSQWEAILTEVGSFHGPYAKHKLQRFQWTSEQIAELLDDFTKRQLNDTRYASKLAARYMACLYGGLSDSCGQRIFVSPGQVTAFLRRLWAIEGLLSGGGGKSRDDHRHHAIDAVVVALTGPAWVKALSDAASRAREEGRRRFASLEAPWPGFAAAVQDRLQGLTVSHRANLKVGGAMHDETFYGVIQHPALGPTAVCRKLVHRLSKEDLEHIVDPRVRERVALQLGLQGGDFKQLEAHPPTIPTHDGREVPIRKVRIMKAEHTRRIGQGARARNVMGDDYHHLEVIRQTDP

SEQ ID NO: 9359 - protein, 1027 aa, synthetic construct
  REGION 1..1027: note = Synthetic
MKNQAAVPYVLGIDLGANSVGWAALRHEQGKPSAVLDLGVRIFAAGVTGQMEAGRDESRAAARRVARLQRRQTDRRRRRIHKIYGILADYGLLPANATPADRAKALSVLDNELSARYGAHDNLAYVLRARALGEALSPFELGRALFHLAQRRGFLSNRKSTKEPDDEKGKVKSGITSLAHAIAESGSRTLGEHLSRLDPHEARIRGRYTSRQMYLDEFEKIWESQAVHHPELLNSERKRELLRAMFHQRPLRDQSDRIGDCELEEGEKRAPAWHPLAQRFRLLQEVNHLRLIDPVGVSRALTAEERQAVIPLMEKGDLPIKDLRKLLGIKRNVEINLDRGGKKALIGDRTEEKMRDAFGTAWDALSEEQRLEAITDLAGDLDDAQLASKAQARWGLSAEQAERYSSTSLEVGRYLGFSLKAIAKMLPFLESGADVTTAKEAAYPAGTFQTDLLGALPPVLARLKDLRNPAVLRSLTELRKVVNALIGRYGKPLEIHVELARDLKASRPEREDRWARMRRNEKARAEAAAMIQTEIGVPNPSRADTEKWLLAEECHWRCPYSGRGFSKTQLFHTGEIQVEHIIPFSRSLDDSFANKTLAYSWVNKAKGNRSPREAFRDQSQWEAILTEVGAFHGPYARHKLQRFQWTSEQIAELLDDFTKRQLNDTRYASKLAARYMACLYGGLSDSSGQRIFVSPGQVTAFLRRLWAIEGLLSGGGGKSRDDHRHHAIDAVTVALTGPAWVKALSDAASRAREEGGRKFASLEAPWPGFAAAVQDGIQRLIVSHRADRKVGGAMHDETFYGVIQHPDLGPTAVCRKPVHKLSKEDLEHIVDSRVRERVALQLGLQGGDFKQLEAHPPTIPTHDGCEVPIRKVRIMKAEQPRRIGQGLRARNVMGDDYHHLEVIRQTNPRTGKTKWALAAVTCQQAMERVRDHKPLVSRDHGPHAEFVCSIAKDDTLEITQDGQTRLVLVGTLEFRNNRIGFRALNDARPFGAASRNREYAAVSKLMDTLKCRKVTVSPLGETHYAND

SEQ ID NO: 9360 - protein, 988 aa, synthetic construct
  REGION 1..988: note = Synthetic
VRIFQAGMTGLESGQDESNAAKRREARLQRRQTDRRRRRIHKIYRLIASWGMLPEARTPEDRTGALTELDRLLAVKFQAHDKLPYILRARALDGKLEGFELGRALFHLAQRRGFLSNRKSERETEEERGKVKAGITTLANQIKESGTRTLGEYFSRLDPAESRIRGRYYTSRSMYLNEFEAIWAAQRPYYPTLLTQARRDQLAHALFFQRPLREQSELIGGCDLEPGEKRAPAWQPLAQRFRLLQEVNHLRLSDGSGFGRALTEEERALVIERLEQGDLLLREFRKLLGLGRTVQVNLESGGKKALVGDRTTAKMRAVFHHHWDAMDGTQRMEAIADLAGGLDDTSLAAKAAQRWGLNELNAQEYAETALETGKYLSLSLKAMEKLLPYLEAGSDVTTARMAAYPASFRTEVRDTLPKVTGELKEIRNPAVVRALSELRKVVNALIRRHGKPEEIHIELARELKAPRPEREKKWQRMRQLENERDSAATLLEKELGINRPSGADIEKWRLADECNWRCPYSRRGFSASQLFNSGEVQVEHIVPFSRSLDDSFANKTLAYVSVNAIKGNRTPREAFAGSAEWDEILEEARHFKGPLARHKLQRFQWTEEQVGEMLGDFTARQLNDTRYSSKLAARYLACLYGGLSDATGKQRILVSPGQVTAFLRRLWGIQGLLSGGETKTRDDHRHHLIDAVAIALTGPKWVKALTDAAQRAHEAGRRRFASIETPWAGFTAEVRAALEGTVVSARVIRKARGALHEETLYGVIQHPEHGRVTVKRKPVHALSKDEIEHIVDGRIRERVQFQLNIHQQNIKGLEKDPPTLPARGGKEIPIRRVRIWNKEEPRRVGAGFRQRNVVGGDYHHFEILRVADPKSGKTKWGFKPVGIHEAMERVKAKRPVVNRDHGAGAEFVCSIAKGETCEIEEGGARKLVLVQALEATGSTVGFKGLTDARPYGAANKNRERYAISVLMGKLKCRKVAVSPLGEVHPSHD

SEQ ID NO: 9361 - protein, 867 aa, synthetic construct
  REGION 1..867: note = Synthetic
VRVFSAGAAGLESGRDESNAAKRRVARLQRRQTDRRRRRIGKIYGIIAGFGMLPAAKSPQDRTRALTELDQTLSKKFDAAENLPYLLRARALDGPLEPFEIGRALFHLAQRRGFLSSRKSQRETDDERGKVKAAITTLAQEISTAGARTLGEFFAGCDPSERRIRGQYTSRQMYVHEFEAIWAAQREHHPETLNDERYKRLKLAIFYQRPLRDQSDLVGDCELETGEKRAPVWHPLAQRFRLLQEVNNIRLTDGTGTARALDRTERALVIERLGRGDIPLRELRKLLGLGRSVEINLDRGGKKALIGDGTAEKMRRVFRHYWDAMSSDEQMEAASYPSGGLDDASLAKMAGEKWGLNELNAQEYSETALETGKYLSLSLKAIEKLLPHLERGSDVTTARMKEYPETFRTEVRDLLPKVDDIKDIRNPAVHRSLSEMRKVVNALIRRYGKPGEIHIELARELKAPRPEREKKWDRMRRLEDERKEATAKLLKDVGIERPSAADIEKWRLADECNWRCPYSRRSFSKHQLFGSGEVQVEHIIPFALSLDDSFANKTLAYASANTLKGNRTPRAAFANTPEWDEILQEVKRFQPPLGPHKLERFQWTDEQVTELLADFTKRQMNDTRYASRLAARYVAGLYGGLSDESGTQRVLVSPGQATAFLRRLWGIGGLFSDDGKKTRDDHRHHLVDAITVALTGPKWVKALADAASQAHAAGRRRFASIQAPWDGFGTDVREALDQVVISVRADRKAGGALHDETNYGVIDDGSKVVVRKPVHKLTASEVERIVDERVRDRVRIQLNILHQNVRKLESDPPTLPTRHGKEIKIRKVRICVAENRPRKVGSGIRERNVVGGDYHHFEVLKRTDPRT

SEQ ID NO: 9362 - protein, 994 aa, synthetic construct
  REGION 1..994: note = Synthetic
MADLSLGIDLGANSLGTALIERERHEIRFTGVRIFQAGVDGDIESGRDESRAVKRRQMRLQRRQAWRRVRRLNKTLRLLQRYGLLPVGEAACVIPALDRELHARYPETEVLPYFLRARALDHPLTAQELGRALYHLAQRRGFLSNRRAPEKEDEKKGKVKGGIESLEGQIETSGKRTLGEYLASLNPHEARIRTRYTHRPMFEREFAAIWTAQRAHHPEVLTEARFAELREALFFQRPLKDQSHLIGQCSLMPELKRAAIYLPEIQRWRYMQVINNLKLLSPSGEERTLTDRERESLYQACEAQEKVALKKAKKLIGVTDLWKFTVESGGEKELNGNLTNVRLEKILNLRWRRMSADRQIELLKDWADAKTDEAFQALAQEKWECSPEEAKALSELRLPDDYASVSLEAARRILPYLERGVTFGEARKAEFPEQFVAKEPLPLLPPVKEALPEVRNPAVMRALTETRKTVNAIIRKFGKPDYVHVELGRDLKRNRDERTKLSSKNREQKKKRDQARDALRTHGLPEPRRSDIEKYLLWQECKETCPYTGKSISLNAIFGANPMFDVEHIIPFSRSLDDSFLNKTLCYKPENANKANRTPWESYGGTPQFDEIVERVKRFGNDAKLRRFQMRETDLAKLLEDFSSRQLNDTRYASRLAQQYLGLLYGGRSDANGKQRVFVSNGQATAFLRQKWNLNRILSDSPHKSRDDHRHHAVDAAAVAMASAAMLQELARAAENAVRERHRQFGTFAYPWPEFREQLAAAIHATNVSHRPMRKLGGPLHEETLYGKPHVGRDGKHYVHIRVPVEKADIEEIVDPTVREAVRIAREAKTAPGLTTRDGRSIPIRKVRVRSVVKTVPVGEGARRRNVVTGDNHHMEVVGETKGKKAVYSGVVVSRLEAARRNRLKIPVVQRDHGPDKEFLFSLSEGDMVEWKGRYWRVRGVTTQSNGMPILSPATDARLKAEAVVERPTVNVFCKAGGRKVAVDHVGEVRLARD

SEQ ID NO: 9363 - protein, 771 aa, synthetic construct
  REGION 1..771: note = Synthetic
MPKMTNFVLGIDLGVRSVGLALIDPEGHQIVNTAVRVFREGVEGDFESGQDTSRNTKRRQARLARRQTERRVRRAHKVFHLLQRAGLLPAGEVQAALKKLDLDLAKIYPPHPGVPYTLRAKALDAALTPFELGRALYHLAQRRGFLSNRRAPVKDDEEAGKVKSGIESLNGAIRAAGARTLGEYFSRVDPHQKRIRNQYTDRKMYLNEFDAICAAQSVHHAETLTPEFQKELKLAIFHQRPLKDQSHLIGACTLMPAEKRAPLYHLDFQRFRLLDKVNNLRLADSERHLTGEERQKLVAALTVQEALTYAKVRELLGLPKSAKFSIEAGGEKKILGNVTNARFAGALNLRWDQMARAEQDALVALWAAAPDDETFQARLEETGEYSAEEIGRLLTVRLPDDYGGFSLAAIRQLLPKLEEGLTTGEARKAVFPESFAATEPQDRLPPVLEALPELRNPAVTRTLTELRKAVNELVRRYGKPGVIQVELARDLKRNKKDRQALTEQNRDNEKKRDRARAELLQFGLTMPSRRDIEKYLLWEECGRMCPYSGRPISLHALYQEPQFDIEHIIPHSRSLDDSFQNKTLCLREYNHRKHNRTPWEAFGGNPEEWEPMIARVKKFGNKNKLKRFEMRETETAELLEQFSSNQLNDTRYMSKLAGKYLGLLYGGVSDATGTQRVFACAGGVTAVLRRMWGLDRILNPDAPGKSREDHRHHAVDAATVAVASRRMIQLLATAAGQAEAAGQRWVKSFEEPWPGFGGQLRSAILDSTTVS

SEQ ID NO: 9364 - protein, 980 aa, synthetic construct
  REGION 1..980: note = Synthetic
MPKMTNFVLGIDLGVRSVGLALIDPEGHQIVNTAVRVFREGVEGDFESGQDTSRNTKRRQARLARRQTERRVRRAHKVFHLLQRAGLLPAGEVQAALKKLDLDLAKIYPPHPGVPYTLRAKALDAALTPFELGRALYHLAQRRGFLSNRRAPVKDDEEAGKVKSGIESLNGAIRAAGARTLGEYFSRVDPHQKRIRNQYTDRKMYLNEFDAICAAQSVHHAETLTPEFQKELKLAIFHQRPLKDQSHLIGACTLMPAEKRAPLYHLDFQRFRLLDKVNNLRLADSERHLTGEERQKLVAALTVQEALTYAKVRELLGLPKSAKFSIEAGGEKKILGNVTNARFAGALNLRWDQMARAEQDALVALWAAAPDDETFQARLEETGEYSAEEIGRLLTVRLPDDYGGFSLAAIRQLLPKLEEGLTTGEARKAVFPESFAATEPQDRLPPVLEALPELRNPAVTRTLTELRKAVNELVRRYGKPGVIQVELARDLKRNKKDRQALTEQNRDNEKKRDRARAELLQFGLTMPSRRDIEKYLLWEECGRMCPYSGRPISLHALYQEPQFDIEHIIPHSRSLDDSFQNKTLCLREYNHRKHNRTPWEAFGGNPEEWEPMIARVKKFGNKNKLKRFEMRETETAELLEQFSSNQLNDTRYMSKLAGKYLGLLYGGVSDATGTQRVFACAGGVTAVLRRMWGLDRILNPDAPGKSREDHRHHAVDAATVAVASRRMIQLLATAAGQAEAAGQRWVKSFEEPWPGFGGQLRSAILDSTTVSHKPERKLSGALHEETLYGRPKQDAAGKNWVHIRKPVHLLKEKDIDQIVDPTIRERVRLQVGLLGGDLKKLEREPATLETSDGRRIPIKKVRIRLVAQTRVIGQGARQRNVIPGDNHHMEVVAVQKKGKTAYMGHVVSRLEATRRHVAGEPVVRKEHGPDTEFLFTLSEADMVVWKGELWRVRSVDTNQQIFLSRASDARQKADIVKAGE

SEQ ID NO: 9365 - protein, 1008 aa, synthetic construct
  REGION 1..1008: note = Synthetic
MTAANGFVLGVDLGVRSVGLALIDPDAKEIIHTAVRVFPPGVAGDFESGRDESNNKKRREARLARRQTERRARRLRKIYHLLQAHGLLPEGEAAESLRALDQQLAAKYPPHPGIPYTLRARALDHALEAHELGRALYHLAQRRGFLSNRRAPVKEDKEQGKVVRGIEGLQAEMRAAGARTLGEYFAGLATGRDAEALRIRHRYTHRKMYHDEFDAIWAAQAAHHPEILTEEFRKELWEAIFHQRPLKDQSHLVGACSLLPREKRAPLYHLDVQRWRLLGKINNLKVQDRSPEWLTDSERAKLAQALTTAESMKYAEVRKLLGLPKESRFSIESGGEKEILGNVTYARFAKALNLRWDQMERAEQDGLVEMWASSPDDESFRTALEATGAYSVEEIEALLKVRLPEGYAAFSLAAIRLLLPYLEAGTTEGEAKRAEFPESFAATEPKDKLPPVLEALPELRNPAVTRTLSELRKAVNELVRRYGKPAEIRVELARDLKRNKRERDKLNKKNRENERMREEARKALNEYADTQWSRGAELKYLLAKECGWTCPYSGRPISLKALFDEPLFDVEHIIPYSRSLDDSFQNKTLCARDYNARKGNRTPWEAFHGSDEWDAMVDRVKGFRNRAKLKRFTMEETETAKLLETFSSNELNDTRYMSTLAGKYLGALYGGVVDAEGKRRVRSCAGQVTALLRRLWGLNQILSETPEKSRDDHRHHAVDAAAVAMVTDGMIKAVAEASARAEAAGQRWLKTFEEPWVGFRDALKAQILERTVVSHRPERKLAGALHEETLYGRPHEENGKQVVHIRKPVHLLKKDIENIVDPTVRKRVQLQLGLVGGELERLEQEPPRLASGTPIRKVRVKQVAKTVPLGEGKRRRNVITGDNHHMAVFAIQKRGKTTYVGEVVSRLEAVGRHREGQPVVQKDRGPDKEFLFSLSQGDMVKWEGELWRVRGVTSESNGRLELSRAWDARRKKDMKGGDLQRPPVNTFCSSGGRKVHVTAVGAVREAHD

SEQ ID NO: 9366 - protein, 625 aa, synthetic construct
  REGION 1..625: note = Synthetic
MPIASNGFVLGVDLGVKSVGLALIDPESQRIIHTAVRVFPAGVAGTETDFASGRDESKNKKRREARLARRQTERRARRMHSVFRLLQRQRLLPEGEAAECLKELDRKLAAKYPPHPGVPYTLRAKALDSPLEEHELGRALYHLAQRRGFLSNRRAPVKDDEKDGAVLGGIKGLSGDIQEAGARTLGEYFAKVDPHAKRIRMRYTHRKMYQEEFDALWAAQALHHPEILTPEFRESLRKAMFHQRPLKDQSDKIGACSLMPEHKRAALCELDTQRWRLLDKVNNLRLEDPAAKLTSEARESLLRELTVRESLTYPQVRKLLDLPKSSRFTIEDQGRGEKKILGNVTSAKFSQALNLRWDQMPRPEQDALVALWASADDDEQFRSALGAAGGYSSEEIERLLNLRLSDARVGFSLPAIRRLLPHMEAGATTGEARKAEFPESFVAAEPKDSLPPVLEALPELRNPAVTRTLTELRKAVNELIRRFGKPAEIRVELARDLKRNKKDRQSLTKLNRENEDRRDEASAKLKSYDPNPSRRTIEKYLLWEECGHTCPYSGRSISLQALVDGGEFEVEHIVPYSRSLDDSFQNKTLCVRDYNARKESRTPWEAFGPNSEEWEPMVQRVKDFK

SEQ ID NO: 9367 - protein, 1017 aa, synthetic construct
  REGION 1..1017: note = Synthetic
MPADVNGFVLGVDLGVKSVGLALIDAQGQRFVRTAVRVFPAGVEGDFESGKDESKNKKRREARMARRQTERRARRMHKVFHLLQRQGLLPEGEPQDCLKALDRELARTYGPHPGAPYTLRAKALDHPLKPHELGRALYHLAQRRGFKSNRRAPVKEDEEKGKVASGIEGLAKRMADASARTLGEYFAGVNPEKERIRTRYTDRRMYAAEFDAIWAAQAVHHPEILTAEFRERLREAIFRQRPLKDQSHLIGACSLMPEEKRAPLYDLDVQRWRLLDKVNNLKLAEPEERRLTAEERAKLVKELTVEESLTYVQVRKLLGLPKSTRFSIESGGENKILGNVTYARFAKALNLRWAQMARAEQEALVGLWASAGDDDEFRAALDATGKYSVEEIAELLKVRLPDDYTGFSLAAMRRLLPHMEAGMTTGEARKVEFPESFAAVEPKATLPPVVEALPELRNPAVMRTLTELRKAVNELIRKYGKPAEIRVELARDLKRNKKDRQALSKQMRDNEAKREKARAALKEYGLTALKPRDPAIEKYLLWEECGHTCPYSGRSISLDGLFGHAPQYDIEHIVPYARSLDDSFQNKTLCLKEYNAQKRNRTPWEAFGADEETWAQMVGRVKKWGNRGKEKRFLLQETDTAKLLEQFSSNELNDTRYMSKLAKRYLGTLYGGDVDAAGKRRVFACAGGVTALLRRLWNLNTILNEKPEKSRDDHRHHAVDAAVVAMVTNGMIKRLGDAAEQAEAAGQRRVKTFAPPWEGFRDELEEQIQRRTVVSHRPERKLAGPLHEETLYGRPHVRNGKAVVHIRVPVHLLSAKDLYDIVDGEVMKAVKARLLERLGKEDFKRLEHEPPMLKTRKGASVPIRRVRIRVVAKTVPIGKGEPRQKRNVITGDNHHMAVFAVRAKGKTSYVGEVVPRLEAVRRHANGEPVVRKDRGPDSEFLFTLSKGDMVRWREELWRVRGVKSTTVVELSRASDARLKADSNKTGGLEATTINSFCKSGLRKVHVSALGEIREAHD

SEQ ID NO: 9368 - protein, 1022 aa, synthetic construct
  REGION 1..1022: note = Synthetic
MSTYNDWVLGIDLGANSLGYALIDEQDQRIVHSGVRIFEAGVANLDSSKEQSKNTERRLARQVRRQTDRRRHRYQAVFRVLQQHGLLPYGKRQEVLQSLDQALSVKLDEHVKLPYLLRTRALDEALEPHELGRTLYHLGQRRGFLSNKKAMDKGDDDSKPGLIKKEIEGLRGRIQESGARTLGEYLFLHVDPHRERIRSRFTDRKMYQEEFERIWDKQRQYHPDHLTDDLRTQLHHAMFFQRPLKDQSDKVGRCELEPGESRAPMARLEVQRFRLLVVLNNLRLYRGTEAPRALTDEERNAIVNISESGETLKLPAIKKRLKLPPACKFSIEHGKEDKVPGNATAARIQKAIGRAWEDMATVDRHRLVRTLVEATGSEEELAEKLQHEYTFDIPSAIALSEVTLPSGYYSISLKAIERLTPLLEQGMTYPEAKKHAGYDDLQRTEPLDLLPPVQDSLPTVRNPIVVRALTELRKTVNAIIRKFGKPGIVRVELARDIRRGYEERMRLLRTNRDREAERNRAKEALAPYLKCPPEAVKRRDVEKYLLWEECRHQCPYTGRTISMEALFGPAPLFQIEHIIPLSRSLDDSFDNKTLCANEANAQKANRSPWEAFGETDDWDRMVEAVKGFNNSRKLSRFVMMDADRDTLLEEFTTRQLNDTRYASKLAARYLGLLYGGVNDADGQKRVYTCAGPVTAYLRREWKLDSILNPEAPGKSRDDHRHHAVDAITVALCSQGTVQRLSEAAERAGSVHRMRFGGFFDLPWPTFKQDVAAAIEKINVSLRPDCKLQGQMHDATFYSKSWQGEDGKKYVSVRKPVAADGYQIEDIVDTGIRARVQEKLNAVGSKKKLAADPPLDAAGRPIKKVRVRVVAQSDLAVVGEGPRARNVSPNSIHHTEILRDETDRGRARYRHVPVTTIDAMQRQRRRLPIVQKEHGERVSFLCTLRPGDVIEAAQTNDGPKRLWRVRTIKSSGQLETHLLVDARQKSDIQKARALWAPTVNTLFSSGARKVSINYLGEVVPAND

SEQ ID NO: 9369 - protein, 1019 aa, synthetic construct
  REGION 1..1019: note = Synthetic
MSNPSEYVLGIDLGANSLGTALIDLDKQDVVFTGVRIFKEGVESLDTAKEASRGVARREARQQRKQVDRRRRRMLGLWRILQSAGLLPLGERQAVLNQLDRQFQKLYPSPYALPYTLRARALDHKLEPFELGRALYHLGQRRGFLTNRKAALKEDEKLGLVKSGIVGLLADMQAAKARTLGEHFARNVDPLQKRIRARYTSRAMFIAEWEAIWTAQSVHYPDLLTPALHDRLHHQLFFQRPLRSQSHLVGKCELEPNEKRAPMALPVVQRFRLLTAVNNLRLISNRGPAPDFTAEMRQQTLSWLAATETMKLSALRAKLKLPKGVIFSIETGGEENLKGDLVNARFKKHLGADWESLTPSQQTALAQNVITAPDDDDEAVAALMATCKLNSESAVAALSITLPSGYFSISSRAIQALLPDLEAGITYAEARHRVYPPPVSEPITKLKPVEIALPTIRNPIVMRALTELRKTVNAIVARFGKPSSIHIELGRDLRKGFDERMRIGKSNRDQEKRRDEAKEELSKQTGKPTSAINRRDIEKYLLWKECGHTCPYSGHSISINALFGDHPQFDIEHIIPLSRSLDDSFDNKTLCYREFNSIKSNRTPFEAFGAQEDEWQAMVSRVEGWNNDHKLSRFRMAEADPDAMLEAFTSRHLNDMRYASRLAAQYLGSLFGGSNGVDPAGQKRIITCSGPITAFLRNEWGLNRVLNPQGTHKSRDDHRHHAVDAIAIALCSPATVKRLSDCAAQARAQGRRRFGMLPLPWPEFYAQVEKRIAETAVSLRPEYKLNAQMHDQTLYSPPKRSTDNRSVVHIRQAVQNANVADIVDPTVRQAVELKIAELGSQKRLEGNWPELVHPNGRRVPILRVRVAKRETPVRLGKADSERFVLPNSIHHTEIVRDESTKTTKFVNYPVSVIEAMRRKRDREPIVRTDFGERASLVCTLRSGDILSLARTGDSLTELWLVRSVNSSGQMELNLLRDSRKKADIQKDAGLWKPSVNPVFKAGAQKVTITHLGEIIRAND

SEQ ID NO: 9370 - protein, 1008 aa, synthetic construct
  REGION 1..1008: note = Synthetic
MSNENGSVLGIDLGANSLGTALIDRNAQQIRFTGVRIFAAGVNNLDESKEAPRGVERRMARQQRKQIDRRRRRFHNTFGILQHAGLLPPGPRTPEYFAALDNNLREKFGNPEKLPYAIRAAALDQLLDPFELGRALVHLAQRRGFLSNSKAVEKDEKEAGKVKEGIAELEQNIAAANCRTLGEYFAKHVDPKQRRIRARYTQRKMYQNEFEAIWRAQLSFGSTLLTATLKSRLANAIFFQRPLKSQADKVGRCELEPGCKRAPVALLEVQRFRFLSVLNNLRIVDTDGRNDRLSDVQRAAVLARSETGEKLAFSKLKKPLGLEKNQSFSAESGGAEDLPGVPSAYRLRKALTRAWDDLTPERQRELVEFLVLGAGHPEDQIAHLIAGFEFDEATASAAVATALPQGYYSISLEAIRKMMPLLAAGQSYATARKEIYGEVRRSEPVALLPALNTETVRNLIGDVRNPIVMRSLSELRKTVNAIVRKYGKPEFIHIELARDVRRNADERARLSKRNNDQRKTREAATQHIASVQGIPVGNITRRDVEKYLLAQECGFRCPYSGRTISMEALFGQHALFHIEHVVPYSASMDNSFDNKTLCYHELNAVKRDRTPWEAFGASGDWENIVERVKRWPAPNPRKLRRFLMNETDRAKLLEEFSSRQLNDTRYASRLAALYLGLLYGGTVDADGSKRVFTCSGPVTSILRDVWDLNRILNPASPGKSREDHRHHAVDAAAIALCSQGMVQRLSEAATQAASIGRRRLAPVGEPWPGFREDLEKSVLATNVSLKPEYKLQGAMHDQTLYSRQRPAPDGKKVVHIRKPVTEVKPAEIVDPRVREAVEATIAEVGSAKKLGVDDKWPVLTTRTGKTIPIKRVRVKKSETPVALGHGVKGRWVVPNSVHHTEIVRNESGKKVRFDHHPVSTIEALRRLGAGEPVVRRDFGEKCRFVCSLRSGDLLEFRVSHTPNTLWLVRTVKSSGQIELNPVSDGRKKAEIMDSKLNPTRVFLTQSVN

SEQ ID NO: 9371 - protein, 1031 aa, synthetic construct
  REGION 1..1031: note = Synthetic
MSNENGSVLGIDLGANSLGTALIDRNAQQIRFTGVRIFAAGVNNLDESKEAPRGVERRMARQQRKQIDRRRRRFHNTFGILQHAGLLPPGPRTPEYFAALDNNLREKFGNPEKLPYAIRAAALDQLLDPFELGRALVHLAQRRGFLSNSKAVEKDEKEAGKVKEGIAELEQNIAAANCRTLGEYFAKHVDPKQRRIRARYTQRKMYQNEFEAIWRAQLSFGSTLLTATLKSRLANAIFFQRPLKSQADKVGRCELEPGCKRAPVALLEVQRFRFLSVLNNLRIVDTDGRNDRLSDVQRAAVLARSETGEKLAFSKLKKPLGLEKNQSFSAESGGAEDLPGVPSAYRLRKALTRAWDDLTPERQRELVEFLVLGAGHPEDQIAHLIAGFEFDEATASAAVATALPQGYYSISLEAIRKMMPLLAAGQSYATARKEIYGEVRRSEPVALLPALNTETVRNLIGDVRNPIVMRSLSELRKTVNAIVRKYGKPEFIHIELARDVRRNADERARLSKRNNDQRKTREAATQHIASVQGIPVGNITRRDVEKYLLAQECGFRCPYSGRTISMEALFGQHALFHIEHVVPYSASMDNSFDNKTLCYHELNAVKRDRTPWEAFGASGDWENIVERVKRWPAPNPRKLRRFLMNETDRAKLLEEFSSRQLNDTRYASRLAALYLGLLYGGTVDADGSKRVFTCSGPVTSILRDVWDLNRILNPASPGKSREDHRHHAVDAAAIALCSQGMVQRLSEAATQAASIGRRRLAPVGEPWPGFREDLEKSVLATNVSLKPEYKLQGAMHDQTLYSRQRPAPDGKKVVHIRKPVTEVKPAEIVDPRVREAVEATIAEVGSAKKLGVDDKWPVLTTRTGKTIPIKRVRVKKSETPVALGHGVKGRWVVPNSVHHTEIVRNESGKKVRFDHHPVSTIEALRRLGAGEPVVRRDFGEKCRFVCSLRSGDLLEFRVSHTPNTLWLVRTVKSNGQIELNPVSDGRKKAEIMDSKLNPTRVFLTQVVNITFAEGARKVLVSHLGEVLAAHD

SEQ ID NO: 9372 - protein, 1031 aa, synthetic construct
  REGION 1..1031: note = Synthetic
MSNENGSVLGIDLGANSLGTALIDRNAQQIRFTGVRIFAAGVNNLDESKEAPRGVERRMARQQRKQIDRRRRRFHNTFGILQHAGLLPPGPRTPEYFAALDNNLREKFGNPEKLPYAIRAAALDQLLDPFELGRALVHLAQRRGFLSNSKAVEKDEKEAGKVKEGIAELEQNIAAANCRTLGEYFAKHVDPKQRRIRARYTQRKMYQNEFEAIWRAQLSFGSTLLTATLKSRLANAIFFQRPLKSQADKVGRCELEPGCKRAPVALLEVQRFRFLSVLNNLRIVDTDGRNDRLSDVQRAAVLARSETGEKLAFSKLKKPLGLEKNQSFSAESGGAEDLPGVPSAYRLRKALTRAWDDLTPERQRELVEFLVLGAGHPEDQIAHLIAGFEFDEATASAAVATALPQGYYSISLEAIRKMMPLLAAGQSYATARKEIYGEVRRSEPVALLPALNTETVRNLIGDVRNPIVMRSLSELRKTVNAIVRKYGKPEFIHIELARDVRRNADERARLSKRNNDQRKTREAATQHIASVQGIPVGNITRRDVEKYLLAQECGFRCPYSGRTISMEALFGQHALFHIEHVVPYSASMDNSFDNKTLCYHELNAVKRDRTPWEAFGASGDWENIVERVKRWPAPNPRKLRRFLMNETDRAKLLEEFSSRQLNDTRYASRLAALYLGLLYGGTVDADGSKRVFTCSGPVTSILRDVWDLNRILNPASPGKSREDHRHHAVDAAAIALCSQGMVQRLSEAATQAASIGRRRLAPVGEPWPGFREDLEKSVLATNVSLKPEYKLQGAMHDQTLYSRQRPAPDGKKVVHIRKPVTEVKPAEIVDPRVREAVEATIAEVGSAKKLGVDDKWPVLTTRTGKTIPIKRVRVKKSETPVALGHGVKGRWVVPNSVHHTEIVRNESGKKIRFDHHPVSTIEALRRLGAGEPVVRRDFGEKCRFVCSLRSGDLLEFRVSHTPNTLWLVRTVKSSGQIELNPVSDGRKKAEIMDSKLNPTRVFLTQVVNITFAEGARKVLVSHLGEVLAAHD

SEQ ID NO: 9373 - protein, 1024 aa, synthetic construct
  REGION 1..1024: note = Synthetic
MSIARGLVLGIDLGANSIGTALIDSSTQEVVFTGVRIFKAGVDKLDESKEASRAVERRTSRLMRRQTDRRRRRQAKIYGLLQRGGMLPPGDRGGAEFQALDRALTAKFGHADKMPYRLRALVLEAKLEPMEIGRALYHLAQRRGFQSNRKAGAKADEDRGKVKSGIGELEAKMTAAGASTVGQYFGLHVDPKEERIRSRYTHRSMFEKEFDAIWEAQRKHWPMLLGEPLRKDLRQAYFYQRPLRDQSDKVGCCDLEPGEKRAPMGLLEVQRFRFFSAANNLRLIDTNGNEFGLAGEQRGALLAMSLHGEKLKLSSIKKKLKLADGIAFTIERGGEENLPGNPTAVRMAKAMGREWEDRDLAAQAELVRVLLAQTGTDEEAEAELRAKFGLDEATAIAAAAVPLPEGYYSVSLAAIRKLMPRLEGGMTYAESRSQVYGAVRRTEPIPLLPGLDDERVKSAVGDIRNPIVLRALSEFRKTVNAIVRKYGRPDFIHIELARDIRKGVEERNRLSQKNRERENKRASAAAALEEHLGMPAGNISRRDIEKYLLWKECGCHCPYSGRAIALSALFGANAFFHIEHVVPFSVSLDDSFDNKTLCYHELNSVKRDRTPWEAFGAMADWEVMIGRVKGWNNPRKLRRFTMTEPEKAKLLEEFSTKQLNDTRYASRLAAQYAGLLYGGTVDADETKRVYTCSGLITAYLRNEWDLNRILNPNAPGKSRDDHRHHAVDAVAIAMCSQGTVQRLSEAASKAMAAGRRRFGVLEQPWVGFREQVAEKVLATVVSLKPEYKLQGAMHDQTLYGRPKKGGDGKSYVHVRKPVTGAKPEEIVDRRVRDAVIAKIAEVGSAKKLEGNWPVLMQKGGKAIPIRRVRVRMKAATTEVSHGAKKRWVLEKSIHHVEVVRNESGKRVKFDDHPVTTKDVLERKKDGKAIVRREFGERETFICTLRKGDVMEARKEGRPVQLWLVRNVDAAGQMEANLISDSRTKKEIIADKENGLWKPTVNAAFCNDARKVTVSHLGEILASHD

SEQ ID NO: 9374 - protein, 757 aa, synthetic construct
  REGION 1..757: note = Synthetic
LLPNGERGGSEFQALDRSLVTKYGHAEKMPYQLRAIALEQKLEPMEVGRALYHLAQRRGFLSNRKAGGKADEEKGKVKGGISELEGRIAAAGARTVGEYFGLHVDPKEERIRSWYTHRSMYQREFEAIWAAQQAHWPLLLNDKLRAELRLAYFHQRPLKDQSDKVGRCDLEQESKRAPMGCLAVQRFRFYSASNNLRLIDTNGVERGLTAEERSTLYELSLTGDKLKLSVIKKKLKLAAGTAFTMERGGEENLPGNPTAARMRKAMGREWDDRDGATQAAIVDLLLAENGTEEEAAASLRQRFGLDEATALAAAAVNFPEGYYSISRAAIEKLMPILEQGVTYAEARDQVYGTVKRSEPVHLLPGLCDERVKRIVGDIRNPVVLRALSEFRKTVNAIVRKYGRPDYIHLELARDLKKGAEERSRLSAKNREREKERAEAATALAAHQGRPEMSISRRDIEKYLLWKECRHHCPYSGFPISLDGLFGQNAVFHVEHIVPFSVSLDDSFDNKTLCYHELNSVKRDRTPWEAFGGADDWERMVARVKGWENPRKLRRFTMNETEKAKLLEEFSTKQLNDTRYASRLAAQFAGMLYGGTIDEAGTKRVQTCSGPVTAYLRGEWDLNRILNPNAPVKSRDDHRHHAVDAVAIAMCSQGMVQRLSAAASAAMSVGRRRFGVLEQPWLGFRDQVAEKVWATVVSLKPEYKLQGAMHDETLYGRPRKDAKGKTFVHVRKPVTGAKPEEIVDSRVREAVLAKVAEV

SEQ ID NO: 9375 - protein, 844 aa, synthetic construct
  REGION 1..844: note = Synthetic
LLPNGERGGSEFQALDRSLVTKYGHAEKMPYQLRAIALEQKLEPMEVGRALYHLAQRRGFLSNRKAGGKADEEKGKVKGGISELEGRMSAAGARTVGEYFGLHVDPKEERIRSRYTHRSMYQTEFDAIWAAQHPHLPLLLNEKLRAELRVAFFHQRPLKDQSDKVGRCDLEQESKRAPMGSLVVQRFRFFSASNNLRLIDTNGVERGLTVEERSTLYELSLTGDKLKLSAIKKKLKLAAGTAFTMERGGEENLPGNPTAARMRKAMGREWDDRDGATQAAIVDLLLAEDGTEEEAAASLRQRFGLDEATAMAAAAVNFPEGYYSISRAAIEKLMPLLEQGVTYAEARDQVYGTVKRSEPVHLLPGLCDERVKRIVGDIRNPVVLRALSEFRKTVNAIVRKYGRPDFIHLELARDLKKGAEERSRLSAKNREREKERAEAATALAAHQGRPEMSISRRDIEKYLLWKECRHHCPYSGFPISLDGLFGQNAVFHVEHIVPFSVSLDDSFDNKTLCYHELNAVKRDRTPWEAFGGADDWERMVARVKGWENPRKLRRFTINETEKAKLLEEFSTKQLNDTRYASRLAAQYAGMLYGGTIDEGGTRRVQTCSGPVTAYLRGEWDLNRILNPNAPGKSRDDHRHHAVDAVAIAMCSQRMVQRLSAAASAAMSVGRRRFGVLEQPWLGFRDQVAEKVWATVVSLKPEYKLQGAMHDEKLYGRRREDGNGRVFAHLRRPVIEVKPEEIVDLRVREAVIAKVAEVGSVKKLEGNWPVLVQKGGRHVPIKRVRVRMRVTPERLSKGAKERWVLPKSTHHVEIVRNESGRRLRFDHYPVTTIEALRRKKEGAEV

SEQ ID NO: 9376 - protein, 939 aa, synthetic construct
  REGION 1..939: note = Synthetic
LLPNGERGGSEFQALDRSLVTKYGHAEKMPYQLRAIALEQKLEPMEVGRALYHLAQRRGFLSNRKAGGKADEEKGKVKGGISELEGRMSAAGARTVGEYFGLHVDPKEERIRSRYTHRSMYQTEFDAIWAAQHPHLPLLLNEKLRAELRVAFFHQRPLKDQSDKVGRCDLEQESKRAPMGSLVVQRFRFFSASNNLRLIDTNGVERGLTVEERSTLYELSLTGDKLKLSAIKKKLKLAAGTAFTMERGGEENLPGNPTAARMRKAMGREWDDRDGATQAAIVDLLLAEDGTEEEAAASLRQRFGLDEATAMAAAAVNFPEGYYSISRAAIEKLMPLLEQGVTYAEARDQVYGTVKRSEPVHLLPGLCDERVKRIVGDIRNPVVLRALSEFRKTVNAIVRKYGRPDFIHLELARDLKKGAEERSRLSAKNREREKERAEAATALAAHQGRPEMSISRRDIEKYLLWKECRHHCPYSGFPISLDGLFGQNAVFHVEHIVPFSVSLDDSFDNKTLCYHELNAVKRDRTPWEAFGGADDWERMVARVKGWENPRKLRRFTINETEKAKLLEEFSTKQLNDTRYASRLAAQYAGMLYGGTIDEGGTRRVQTCSGPVTAYLRGEWDLNRILNPNAPGKSRDDHRHHAVDAVAIAMCSQRMVQRLSAAASAAMSVGRRRFGVLEQPWLGFRDQVAEKVWATVVSLKPEYKLQGAMHDEKLYGRRREDGNGRVFAHLRRPVIEVKPEEIVDLRVREAVIAKVAEVGSVKKLEGNWPVLVQKGGRHVPIKRVRVRMRVTPERLSKGAKERWVLPKSTHHVEIVRNESGRRLRFDHYPVTTIEALRRKKEGAEVVRRDFGERSALICTLRAGDVLEASKDGRSAQLWLVRTVKSSGQMVLHLLADARAKSEIENDEATGLWYLNVNTGFSAGARKVAVSHLGEVLVSRD

SEQ ID NO: 9377 - protein, 939 aa, synthetic construct
  REGION 1..939: note = Synthetic
LLPEGERGGSEFQALDRSLVTKYGHAEKMPYQLRAIALEQKLEPMEVGRALYHLAQRRGFLSNRKAGGKADEEKGKVKGGISELEGRMSAAGARTVGEYFGLHVDPKEERIRSRYTHRSMYQTEFDAIWAAQHPHLPLLLNEKLRAELRVAFFHQRPLKDQSDKVGRCDLEQESKRAPMGSLVVQRFRFFSASNNLRLIDTNGVERGLTVEERSTLYELSLTGDKLKLSAIKKKLKLAAGTAFTMERGGEENLPGNPTAARMRKAMGREWDDRDGATQAAIVDLLLAEDGTEEEAAASLRQRFGLDEATAMAAAAVNFPEGYYSISRAAIEKLMPLLEQGVTYAEARDQVYGTVKRSEPVHLLPGLCDERVKRIVGDIRNPVVLRALSEFRKTVNAIVRKYGRPDFIHLELARDLKKGAEERSRLSAKNREREKERAEAATALAAHQGRPEMSISRRDIEKYLLWKECRHHCPYSGFPISLDGLFGQNAVFHVEHIVPFSVSLDDSFDNKTLCYHELNAVKRDRTPWEAFGGADDWERMVARVKGWENPRKLRRFTINETEKAKLLEEFSTKQLNDTRYASRLAAQYAGMLYGGTIDEGGTRRVQTCSGPVTAYLRGEWDLNRILNPNAPGKSRDDHRHHAVDAVAIAMCSQRMVQRLSAAASAAMSVGRRRFGVLEQPWLGFRDQVAEKVWATVVSLKPEYKLQGAMHDEKLYGRRREDGNGRVFAHLRRPVIEVKPEEIVDLRVREAVIAKVAEVGSVKKLEGNWPVLVQKGGRHVPIKRVRVRMRVTPERLSKGAKERWVLPKSTHHVEIVRNESGRRLRFDHYPVTTIEALRRKKEGAEVVRRDFGERSALICTLRAGDVLEASKDGRSAQLWLVRTVKSSGQMVLHLLADARAKSEIENDEATGLWYLNVNTGFSAGARKVAVSHLGEVLVSRD

SEQ ID NO: 9378 - protein, 1026 aa, synthetic construct
  REGION 1..1026: note = Synthetic
MQKNYVLGIDLGSASVGTALLDFENQSIDFVGVRIFDAAMDGDTDTGKEESRAAARRVARGQRRQTDRRRGRFHRTFIALQKIGLMPLGNRSDVLPALQRRLEKRYPETNVLPYFLRARALDHALDTEELARVFYHLAQRRGFLSNRKIDKAPKKENEKLSDFKQELKDLTNALAQSGARSLGEYLNSLDPHQARFRNRHTSRAMYKDEFSLIWETQKKHHPGLLTMDARERLFRAIFHQRPLKDSSDKIGRCELVPSERRMPLWQPEAQLLRILGFVNNLRIDQGPGMPSLPLTTLQREQLLAFLQAHPRITFSEARKQLSLHESARFTIEIHGGEKHIPGNLTESRLREALPGIWTKLPIREQSAILTILDEGIPGDATDEAVRQWFASHYSWNESVLDRLVAVQLPDGYARFSLIAARKLLPHVQAGLSVTEAIQLAFPDHGKPQPPADLLAPVKSILPELSNPNVIRSLTELRKVVNAIIRRYGKPAEVHVELARELKKSKSERANAVKSNREREKLRELAISQLQAHDKVRFQNPSRRDIEKLLLAMQQNYRCLYTGVQFDIDGLLGDHPRFDVDHIVPYSRSLDDSFDNKALVSTDANREKGNRTIIEWLGKESEGFERVLDAAKKMDSRYKNRSKINRITIDMTHDKDLLAEFTQRQLVETRYASKLACRYLGTLFGNEVDESGKRRVFACSGQVTARLRDLWNLNSILSPEDFKKSRDDHRHHSIDAVAIAAASPRMVQLMALAAKERELRGQRRLILSPPWLGFQEQIADKIGALNVSLRPSRKLAGALHEASIYSAPRMVNGKEFVTIRKPIVDIANPDAIVDPTVRAAWIKKRDEISETSNFNPKLFEGNWPVMPNGVPIRRARIHKRESVVALSAGVKQRFVPTGSNHHAAVFEVKKKNGKLAYEVEVVSLLEANDRYRRKLDVVSRVTSQEKRFLFSISAGDIVWANNPGMPDIQLWRVRSMRSNGVMVVHDLRDARLKKDISLWQPTLSAAVAQGMRKVVISQLGEVLKAND

SEQ ID NO: 9379 - protein, 939 aa, synthetic construct
  REGION 1..939: note = Synthetic
LGNRSDVLPALQRRLEKRYPETNVLPYFLRARALDHALDTEELARVFYHLAQRRGFFSNRKIDKAPKKENEKLSDFKQELKDLTNALAQSGARSLGEYLNSLDPHQARFRNRHTSRAMYKDEFSLIWETQKKHHPGLLTMDARERLFRAIFHQRPLKDSSDKIGRCELVPSERRMPLWQPEAQLLRILGFVNNLRIDQGPGMPSLPLTTLQREQLLAFLQAHPRITFSEARKQLSLHESARFTIEIHGGEKHIPGNLTESRLREALPGIWTKLPIREQSAILTILDEGIPGDATDEAVRQWFASHYSWNESVLDRLVAVQLPEGYARFSLIAARKLLPHVQAGLSVTEAIQLAFPDHGKPQPPADLLAPVKSILPELSNPNVIRSLTELRKVVNAIIRRYGKPAEVHVELARELKKSKSERANAVKSNREREKLRELAISQLQAHDKVRFQNPSRRDIEKLLLAMQQNYRCLYTGVQFDIDGLLGDHPRFDVDHIVPYSRSLDDSFDNKALVSTDANREKGNRTIIEWLGKESEGFERVLDAAKKMDSRYKNRSKINRITIDMTHDKDLLAEFTQRQLVETRYASKLACRYLGTLFGNEVDESGKRRVFACSGQVTARLRDLWNLNSILSPEDFKKSRDDHRHHSIDAVAIAAASPRMVQLMALAAKERELRGQRRLILSPPWLGFQEQIADKIGALNVSLRPSRKLAGALHEASIYSAPRMVNGKEFVTIRKPIVDIANPDAIVDPTVRAAWIKKRDEISETSNFNPKLFEGNWPVMPNGVPIRRARIHKRESVVALSAGVKQRFVPTGSNHHAAVFEVKKKNGKLAYEVEVVSLLEANDRYRRKLDVVSRVTSQEKRFLFSISAGDIVWANNPGMPDIQLWRVRSMRSNGVMVVHDLRDARLKKDISLWQPTLSAAVAQGMRKVVISQLGEVLKAND

SEQ ID NO: 9380 - protein, 1026 aa, synthetic construct
  REGION 1..1026: note = Synthetic
MQKNYVLGIDLGSASVGTALLDFENQSIDFVGVRIFDAAMDGDTDTGKEESRAAARRVARGQRRQTDRRRGRFHRTFIALQKIGLMPLGNRSDVLPALQRRLEKRYPETNVLPYFLRARALDHALDTEELARVFYHLAQRRGFLSNRKIDKAPKKENEKLSDFKQELKDLTNALAQSGARSLGEYLNSLDPHQARFRNRHTSRAMYKDEFSLIWETQKKHHPGLLTMDARERLFRAIFHQRPLKDSSDKIGRCELVPSERRMPLWQPEAQLLRILGFVNNLRIDQGPGMPSLPLTTLQREQLLAFLQAHPRITFSEARKQLSLHESARFTIEIHGGEKHIPGNLTESRLREALPGIWTKLPIREQSAILTILDEGIPGDATDEAVRQWFASHYSWNESVLDRLVAVQLPEGYARFSLIAARKLLPHVQAGLSVTEAIQLAFPDHGKPQPPADLLAPVKSILPELSNPNVIRSLTELRKVVNAIIRRYGKPAEVHVELARELKKSKSERANAVKSNREREKLRELAISQLQAHDKVRFQNPSRRDIEKLLLAMQQNYRCLYTGVQFDIDGLLGDHPRFDVDHIVPYSRSLDDSFDNKALVSTDANREKGNRTIIEWLGKESEGFERVLDAAKKMDSRYKNRSKINRITIDMTHDKDLLAEFTQRQLVETRYASKLACRYLGTLFGNEVDESGKRRVFACSGQVTARLRDLWNLNSILSPEDFKKSRDDHRHHSIDAVAIAAASPRMVQLMALAAKERELRGQRRLILSPPWLGFQEQIADKIGALNVSLRPSRKLAGALHEASIYSAPRMVNGKEFVTIRKPIVDIANPDAIVDPTVRAAWIKKRDEISETSNFNPKLFEGNWPVMPNGVPIRRARIHKRESVVALSAGVKQRFVPTGSNHHAAVFEVKKKNGKLAYEVEVVSLLEANDRYRRKLDVVSRVTSQEKRFLFSISAGDIVWANNPGMPDIQLWRVRSMRSNGVMVVHDLRDARLKKDISLWQPTLSAAVAQGMRKVVISQLGEVLKAND

SEQ ID NO: 9381 - protein, 953 aa, synthetic construct
  REGION 1..953: note = Synthetic
MPALQRELEKRYPGIQVLPYYLRARALDEPLEAYELGRALYHLAQRRGFQSNWKDAARAAEMKGKEAEELGKVKGSIEGLAAAMQADGARTLGEYFARLDPEKKRIRNSETEFSHYTSREMYESEFRQIWEAQAPHHEGRLTAALRAALSRAIYYQRPLKDQSRLVGPCELFPKEEKRAAFCTLDAQRMRVLGFVNNLRVEVGLAGESSLTEEQRSALLARCESSERVGFADVRKMPGIGKGTKFTVERGGEKYVPGNITNARLERALGEIWRGMGRDEQERLVGMMADERKYPTSKQLAAALGAEYGFTPALASETAEKVHLPEGYARFSARALRALMPYLEQGLTVEEARKELDPNYRRGGEPLGLLPPVREALPEIRNPAVLRSLTEMRKTVNAIIRAYGKPEEIHIELARELKKTKEDRRKAAKANRDREKLRELAKEELKKFDANRYANPSGGDIEKYLLAMEARWQCPYTQQKYGVCDVFGDHPKVDVEHIIPRSRSLDNTFANKTLAYRGANVEKGQKTPYEWLGEADPDRFERMIETVQGFDGKLFNARAKLRRFTIKATEADELLEEFTERQLQETRYASKLAARYVGLLYGGIVDKEGRTRVLTCAGGVTAALRNLWDLNRILSAEPKKSREDHRHHAVDAIAVALTTRAQVKALADACGDAERAGRRRLTFQPPWSEFKLDVKKAIDGIEVSHRPMRRLAGPLHQETLYSAPRKGADGKGEEVRYRVPVTGFGSEKELENIVDGRVREAVSVWLEGRQEKREQGPRWPELVTRTGKRVEIRKVRIRKAQSVVQVAGGDARRVRYVIPGGNHHMEVIAVDDGEGGVKRYEHVTVTRLEAAQRLKEKRRVVEREQGQGRRFVCSLSEGDLVEAKREGDGQKRVWRVRSVDVNGRFALSAANDARLKADIDKAKGLWRPPVNVLFRARARKVLVDPVGRVIPAND

SEQ ID NO: 9382 - protein, 1047 aa, synthetic construct
  REGION 1..1047: note = Synthetic
MPQRGRVLGIDLGSNSLGTALIDTDSQTVPFLGVRIFPASTEGDRDKGKEESKAKPRREARLARRQTKRRKHRLQKVFRLLQGMGLLPPGSRPDALPALQRELQRRYPETTVLPYFLRARALDHPLHPNELGRALYHLAQRRGFLSNRATAAKEEEDKSAVKSAIKSLREDIATSGKRTLGEFMASLDPHQIPIRNKGEFHAHYTHRSMYEDEFERMWAAQAPHHPTALKDVNKAKLRYALFHQRPLKDQSHLVGICELEPSQKRAPLRCLAAQRLRVLGFVNNLRIRLEDGNEARLTPAQRATLLDLTEESEKLTFAKVRRDLNIPKPLVFTIEKGGEKNVPVDLTSTRLRSVLGALWDDLSPAQRDDLVEDVGDRNRCKTDKDLQACAIEKWGLSPETAEKLAYVRLPPDYALFSARALERLLPHLEQGKSVTEAILAIPEYAERQKAAEPLDLLPPVKKVLGDIRNPAVLRALTELRKTVNAILRRFGKPEYIRIELARDLKKSKKDRLRAVDFNRKRENLREQAKAELSKHDPARFRNPRPSDIEKYLLAMEAGWCCPYTDRHYEFTDVFGDHPQVDIEHIVPRSRCLDNSFLNKVLAYRSANIEKGNLTPYEWLHDSDPDRYERMIAVVKKFDSLFQKGKKLRRFSMQLSDPDSLLTEFSQRQLQETRYASKLACKYLGLLYGGEIDAGGTRRVSATGGQITSMLRRAWDLNLILNPHPLSGSEKIRVDHRHHAIDALTTALASPAIVRALATASAEADRLGRRTIVVPVPFNRLADKVRERIETLQVSHRPTRKLSGALHDETLYSRPRVYAANGDKKSKEYVHYRVPITKLTSVDKIADIVDPTVRKCVLAQFERLGGGGTKFQNNWPILKTRKGGEVPVKRVRIRRVQKVKAIGKGLRERFVIPGSNHHAEIVAEINSRGEIKRYRSEAITLLEAAERKRQGVPVVNRDDGSRGLFVCTLSEGDLIEARKPGDVASLIWRVCSVRQSGQLDLTRANDARLKKDIAGSKGLWRPTIASIFSGGARKVLITHLGEVLPAND

SEQ ID NO: 9383 - protein, 1047 aa, synthetic construct
  REGION 1..1047: note = Synthetic
MPQRGRVLGIDLGSNSLGTALIDTDSQTVPFLGVRIFPASTEGDRDKGKEESKAKPRREARLARRQTKRRKHRLQKVFRLLQGMGLLPPGSRPDALPALQRELQRRYPETTVLPYFLRARALDHPLHPNELGRALYHLAQRRGFLSNRATAAKEEEDKSAVKSAIKSLREDIATSGKRTLGEFMASLDPHQIPIRNKGEFHAHYTHRSMYEDEFERMWAAQAPHHPTALKDVNKAKLRYALFHQRPLKDQSHLVGICELEPSQKRAPLRCLAAQRLRVLGFVNNLRIRLEDGNEARLTPAQRATLLDLTEESEKLTFAKVRRDLNIPKPLVFTIEKGGEKNVPVDLTSTRLRSVLGALWDDLSPAQRDDLVEDVGDRNRCKTDKDLQACAIEKWGLSPETAEKLAYVRLPPDYALFSARALERLLPHLEQGKSVTEAILAIPEYAERQKAAEPLDLLPPVKKVLGDIRNPAVLRALTELRKTVNAILRRFGKPEYIRIELARDLKKSKKDRLRAVDFNRKRENLREQAKAELSKHDPARFRNPRPSDIEKYLLAMEAGWCCPYTDRHYEFTDVFGDHPQVDIEHIVPRSRCLDNSFLNKVLAYRSANIEKGNLTPYEWLHDSDPDRYERMIAVVKKFDSLFQKGKKLRRFSMQLSDPDSLLTEFSQRQLQETRYASKLACKYLGLLYGGEIDAGGTRRVSATGGQITSMLRRAWDLNLILNPHPLSGSEKIRVDHRHHAIDALTIALASPAIVRALATASAEADRLGRRTIVVPVPFNRLADKVRERIETLQVSHRPTRKLSGALHDETLYSRPRVYAANGDKKSKEYVHYRVPITKLTSVDKIADIVDPTVRKCVLAQFERLGGGGTKFQNNWPILKTRKGGEVPVKRVRIRRVQKVKAIGKGLRERFVIPGSNHHAEIVAEINSRGEIKRYRSEAITLLEAAERKRQGVPVVNRDDGSRGLFVCTLSEGDLIEARKPGDVASLIWRVCSVRQSGQLDLTRANDARLKKDIAGSKGLWRPTIASIFSGGARKVLITHLGEVLPAND

SEQ ID NO: 9384 - protein, 1050 aa, synthetic construct
  REGION 1..1050: note = Synthetic
MPILGIDLGSGSLGTALVCPERQEILFAGVRVFPAGVTGNLDEGKEESRTVLRRMARLARRQTQRRQRRLYKVFRILQRMQLLPPGPRVEVLCKLQRELELRYPQTTVLPWYLRARALDHPLERSELGRALYHLAQRRGFLSNRVGGRGDAEKRGIVKDAIRGLRAAIAAAGKRTIGEYMASLTSAEMPIRNKPEISEHHAQRSMCEDEFRLIWEAQAGYHTEILTETWRARLHAAIFHQRPLKDQSYLVGECELDPSQKRAPLRLLAAQRFRVLGFVNNLRIRLDDGNDRKLTPNERTILLDQCEKSEKLSFAAAKRALGLVSTTKFTIEEGGEKNVPVNLVSTRLRAVLGERWDALSPEQKDDLVEDVGDGKRCQTDEALEACARNKWGIPADAAEALGKVRLPDGYGRYSLEALRELLPSLEAGNTVEEAIRAHPRYEKSRRQAEPLPLLPPVKALKDVLGEIRNPAVLRSLTELRKTVNAIVRRYGKPDLIRVELARDLKKSKTERQKDTVRNRDREKLRQEAVDKLREQDPHRFANPRASDIEKYLLVMESKWWCPYSGRQYGFVDVFGDHPTVDVEHIIPRSRSLDDSFLNKTLAYRTANMEKGDRTPREWLFQSDRDRYDAMIDIVKGFDARFDVGKKLRRFSMELSGPDSLLTEFTQRQLQETRYASKLACRYLGVLYGGTVDAEGTQRVSACAGQVTAKLRDAWDLNQILNPERKPKKSRDDHRHHAVDAITVALSSGRLIRDLATAAGEADRLHRRTITLPVPWTGFSEQARKAIESIQVSHRPVRRLSGPLHEDTFYSRPRQCVVGVDAKGKQRTRECVHYRVPVVKLESRKNIEAIVDGRVREAVAAKFDELGGGGNRFEKNWPVLRTRAGGCVPIKRVRVRKSDPVVQIGKAGRERFVITGSNHHAEILKELDPAGRVLRYTFAPVVTMLEAMERKRQGVPVVQRDHGPGLEFLCTLSEGDLVEGKRPQDAQARLWKVRTVDKNGRIFLSSAMDARKKDEIKREHDHWEPTVNSLFGPGAARKVYVTHTGEVIPAND

SEQ ID NO: 9385 - protein, 1093 aa, synthetic construct
  REGION 1..1093: note = Synthetic
MSGALRRTKDRLTLKQPGNRLFDRLLSHYSSLEAMSMADLPLPQIQKGLILGIDLGSSSLGTALVNPESQEIPFAGARVFPAGVVGDIEEGREESRSAQRRDARLARRQTQRRQRRLYKVFHLLQRMGLLPNGPRVEVLYKLQRELERRYPETTVLPYFLRARALDQALDAYELGRALYHLAQRRGFLSNRVGGKKEDAEERSKVKGSIKGLRTAMEAAGKRTLGEYMASLDPRVTSIRNKPEFSDHYTHRSMYLDEFRLIWETQRPFHAEILSEEHRTKLHHAIFHQRPLKDQSNLVGQCELEPGEKRAPLRLLASQRFRVLGFVNNLRVRLEDGNERSLTANERATLLDLCEKAGKLSFAAARRALGFAKSSKFTIEEGGEKNVPVNLVATRLRTVLGEFWDSLPPEAKDDLVEDVGDGKRCKTDEDLESCAREKWGLTQEIAEDLGKVRLPDAYGRYSLKALQSLLPALESGLNVEEAIRSHPQYIESRKPAEPLPLLPPVKDVLGEIRNPAVLRSLTEMRKTVNAIVRRYGKPEFMHVELARDLKKSKKERQTETGRNRDREKLRQEALEDLHGHDAVRYANPRGTDIEKYLLAKEARWQCPYTGREYSFVDVFGEHPSVDVEHIIPRSRSLDDSYLNKVLAYRSANMEKGNRTPHEWLHESDPERYDRMITIVNGFDSRFEVGRKLRRVSMELTEPDSLLTEFTARQLQETRYASKLACRYLGVLYGGEVDGEGNRRVFACAGQVTAKLRKAWDLNQILNPVGKPEKSRDDHRHHAVDALTIALTSTKMVRDLANAAGEADRLFRRKIILPVPWVNFAEAARARIEAIQVSHRPARTLSGPLHEETFYSRPRKYAVEVDKQGKPVEKEYVHFRVPVTKLASKAAAEDIVDLRVREAVIAKAEELGGGGNKFQNNWPVLHTRHGGSVPIKRVRIRKVQSVVPIGKDGRERFVIQGSNHHAEIVAEMDAKGNIRRYVFSTVTMLEALERKRQGVPVVQRDHGPGMQFLCTLSEGDLIEAKRPGDGADSVWKVRGVRQTGQMDLTPARDARLKKDIAADKQLWKPSVGPLFASGARKVLVNHLGEVLPAND

SEQ ID NO: 9386 - protein, 1028 aa, synthetic construct
  REGION 1..1028: note = Synthetic
NPESEEIPFLGVRIFPAGVVGDIEEGREESRSAQRRDARLARRQTQRRQRRLYKVFHLLQRMGLLPAGPRVEVLHKLQRELERRYPQTTVLPYFLRARALDQALDPHELGRALYHLAQRRGFLSNRVGGKEDAEERSKVKGSIKGLRAAIQSAGKRTLGEYMATLDPRATPIRNKPDLSDHYTHRSMYLDEFRLIWEAQRPFHTEILSEEHRAKLHHAVFHQRDLKDQSNLVGQCELEPQEKRAPLRLLASQRFRVLGFVNNLRIRLEDGNERSPTANERATLLDLCEKSEKLSFAGARRALELAKSSKFTIEEGGEKNVPVNLVATKLRAVLGERWDNLSPEAKDDFVEDVGDGKRCKTDEDLELCAREKWGLTPEIAEDLGKVRLPDAYGRYSLKALHELLPALESGLSVEEAIRSHPQYIESRRPAEPLPLLPPVKDVLGEIRNPAVLRSLTEMRKTVNAIVRRYGKPEFMHVELARDLKKSKKERQTETGRNRDREKLRQLAVEELRKHDPVRYANPRGTDIEKYLLAKEARWQCPYTGREYSFVDVFGEHPSVDVEHIIPRSRSLDDSYLNKVLAYRSANMEKGNRTPHEWLHESDPERYDRMIAIVNGFDSRFEVGRKLRRFSMELTEPDSLLAEFTARQLQETRYASKLACRYLGVLYGGEVDAEGNRRVFACAGQVTAKLRKAWDLNQILNPVGKPEKSRDDHRHHAVDALTIALTSTKMVRDLANAAGEADRLFRRKIILPVPWVDFAEAERSRIEAIQVSHRPARKLSGPLHEETFYSCPRKYSIGVDAKGKPVEKEYVHFRVPVTKLASKAAADDIVDVRVREAVIAKAEELGGGGNKFQNNWPVLHTRHGGSVPIKRVRIRKVQSVVAIGKAGRERFVIPGSNHHAEIVAEMDAKGDIRRYVFSTVTMLEALERKRQGVPVVQRDHGPGKEFLCTLSDGDMVEGKRPGDAVPRLWKVHTVDKNGRIFLSAALDARKKDEIKKAHDHWEPTVNSMFAAGGARKVLVTHLGEVIPAND

SEQ ID NO: 9387 - protein, 1058 aa, synthetic construct
  REGION 1..1058: note = Synthetic
MADLSLPQAHKGLILGIDLGSSSLGTALVNPEGEEIPFLGVRIFPAGVVGDIEEGREESRSAQRRDARLARRQTQRRQRRLYKVFRILQRMGLLPLGPRVEVLYELQRELERRYPETTVVPYFLRARSLDQALTEHELGRALYHLAQRRGFLSNRAGGKKDDAEERSKVKGSIKGLRAAIEAAGKRTLGEYMASLDPRVTSIRNKPEFSDHYTHRSMYLDEFNLIWDAQQPFHSGILSAQFRAKLHHAMFHQRPLKDQSNLVGQCELEPEEKRAPLRLLDAQRFRVLGFVNNLRVGLDDGNTRTLSANERALLLDLCEKSEKLSIPAARRALGFARTSKFTIEEGGEKNVPVNLVAGRLRAVLGDWWDHLTTEAKADLGEDVGVGKRCKTDEELELCAREKWCLAPEIAEELSKVRLPDAYGRYSLKALRELLPALEKGLNVEEAIRSHPQYLESRKVAEPLPLLPPVKDVLGEIRNPAVLRSLTEMRKTVNAIVRRYGKPEFIQVELARDLKRSKKERQLETGRNRDREKLRQLAVEELQRHDSVRYSNPRGTDIEKYLLAMESNWHCPYTDRKYGFVDVFGEHPSVDVEHIIPRSRSLDDSYLNKVLAYRSANMEKGNRTPHEWLHESDVERYDRMIALVNGFDSRFEVGRKLRRFSMELSEPDSLLAEFTQRQLQETRYASKLACRYLGVLYGGEVDAEGNRRVFACAGQVTAKLRKAWDLNQILNPVGKPEKSRDDHRHHAVDALTIALTSSKMVRDLANAAGEADRLFRRKIILPVPWVDFAEAARMSIEAIQVSHRPARKLAGPLHKDTLYSRPRKYAVEIDKKGTPVEKEYVHLRVPVVKLGTRAAAEVIVDVRVREAVMAKAEELGGGGNKFQNNWPVLHTRHGGSVPIKRVRVREVKSVVPIGKQGRERFVSSGSNHHAAIVAEMDTKDSVKRYVFSTVTMLEAFERKRQGLPVVQREHGPGMHFLCTLSDGDMVEGKRPGDAVPRIWKVHTVDKNGRIFLSAAVDARKKDEIKKAHDHWEPTVNSMFGAGGARKVLVTHLGELISAND

SEQ ID NO: 9388 - protein, 1094 aa, synthetic construct
  REGION 1..1094: note = Synthetic
MSGALRRTKDRLTLKRPGNRLFDKLLPAYSNQEAMSMADLSLPQAHKGLILGIDLGSSSLGTALVNPEGEEIPFLGVRIFPAGVVGDIEEGREESRSAQRRDARLARRQTQRRQRRLYKVFRILQRMGLLPLGPRVEVLYELQRELERRYPETTVVPYFLRARSLDQALTEHELGRALYHLAQRRGFLSNRAGGKKDDAEERSKVKGSIKGLRAAIEAAGKRTLGEYMASLDPRVTSIRNKPEFSDHYTHRSMYLDEFNLIWDAQQPFHSGILSAQFRAKLHHAMFHQRPLKDQSNLVGQCELEPEEKRAPLRLLDAQRFRVLGFVNNLRVGLDDGNTRTLSANERALLLDLCEKSEKLSIPAARRALGFARTSKFTIEEGGEKNVPVNLVAGRLRAVLGDWWDNLTTEAKADLVEDVGDGKRCKTDEELELCAREKWCLAPEIAEELSKVRLPDAYGRYSLKALRELLPALEKGLNVEEAIRSHPQYLESRKVAEPLPLLPPVKDVLGEIRNPAVLRSLTEMRKTVNAIVRRYGKPEFIQVELARDLKRSKKERQLETGRNRDREKLRQLAVEELQRHDSVRYSNPRGTDIEKYLLAMESNWHCPYTDRKYGFVDVFGEHPSVDVEHIIPRSRSLDDSYLNKVLAYRSANMEKGNRTPHEWLHESDVERYDRMIALVNGFDSRFEVGRKLRRFSMELSEPDSLLAEFTQRQLQETRYASKLACRYLGVLYGGEVDAEGNRRVFACAGQVTAKLRKAWDLNQILNPVGKPEKSRDDHRHHAVDALTIALTSSKMVRDLANAAGEADRLFRRKIILPVPWVDFAEAARMSIEAIQVSHRPARKLAGPLHKDTLYSRPRKYAVEIDKKGTPVEKEYVHLRVPVVKLGTRAAAEVIVDVRVREAVMAKAEELGGGGNKFQNNWPVLHTRHGGSVPIKRVRVREVKSVVPIGKQGRERFVSSGSNHHAAIVAEMDTKDSVKRYVFSTVTMLEAFERKRQGLPVVQREHGPGMHFLCTLSDGDMVEGKRPGDAVPRIWKVHTVDKNGRIFLSAAVDARKKDEIKKAHDHWEPTVNSMFGAGGARKVLVTHLGELISAND

SEQ ID NO: 9389 - protein, 1054 aa, synthetic construct; identical to SEQ ID NO: 6840
  REGION 1..1054: note = Synthetic

SEQ ID NO: 9390 - protein, 1064 aa, synthetic construct
  REGION 1..1064: note = Synthetic
MPNSVPDSATEQQIRAGLVLGIDLGPASLGTALVNPTNRQIEFLSARVFPAGVEGDLEGGKEESRSAKRRQARLSRRQTQRRQRRLYKVFHLLQRFGLLPRGPRVAVLDALQRSVEKRYPETTVGPWFLRARALDHPLDPHELGRALYHLAQRRGFVSNRIGGKENDEERSKVKNAIRGLQAQMDSAGKRTLGEYMASLDPSKIPLRNNPEFSNHYTHRSMYEREFALIWDAQRAYRTEVLTDVRRAKLYHAMFHQRPLRDQSNLIGPCELEPDQTRAPLRSIAAQRFRVLGFVNNLRVRLDDGGERKLTVGERAVLLDLCEKAQKLSMAAARRALGLGKTSMFTIEEGGEKHVPVNLTATRLRAALGSGWDGLTAEEREDLVEDVGNPRRNLTDEDVARCACAKWHFAPDEAEALAKVRLPDAYGRYSAKALVEMLPALERGLTVEEAIRQHARYRESRKPVEPLALVPPVNDPATKKSLGEIRNPAVLRSLTELRKTVNAIVRRYGKPEFVRVELARDLKKSKRERQNETARNREREGLRQLATEELRKHDPARFANARGYDLEKYMLAMEAKWRCPYTGNEYGFTDVFGDHPSVDVEHIIPRSRSLDDSFLNKTLAYHSANAEKGNRTPREWLFESDPARYDRMIQIVKSFDPRFEVGKKLKRFAMALSDPDSLLKDFTERQLQDTRYASKLACRYLGMLYGGPVDASGTQRVFACAGQVTAKLRRAWDLDRILSGKPEKSRDDHRHHAIDALTVALSSAKLIGELATAAGEADRLCRRRIVLPVPWTGFAEQTRASVEALQVSHRPIRKLSGPLHEETFYSRPRSYAAEPDGNGKAQARDVVHYRVPLTSLTSAKHFASIVDSRVRGLVEEKALELGGGGNKFLNNWPLLTGRHGTTVPIKRVRIRATKGVVPIGKEGRERFVVTGSNHHLAVFAQKDAHGAIARYVFETVTMLEAYERKRQGVPVVRRDRGPAYEFSCTLSEGDLIEARRPTDAGARIWKVRAARQSGQLELNASEDARLKKDISEKGDLWSPSIGPLFLNGARKVLVNHLGEAIPCND

SEQ ID NO: 9391 - protein, 1039 aa, synthetic construct
  REGION 1..1039: note = Synthetic
MAAIAPPSFRPGLVLGIDLGSNSLGTALIRTDLDLIEFMGVRIFPAGVEGNLEEGKEESRAAKRRQARLARRQTQRRQRRLYKVFHFLQRIGLLPTGDRLEVLGRLQNELEHCYPQTTVLPWFLRARALDQALGPHELGLALYHLAQRRGFLSNRAGGKDNEKERSEVKASIKGLAAAIEAAGKRTLGEYMASLNPREKLRNSAEFSGHYTHRSMFEREFDMIWDSQKAHHPEILTENHGAKLHDAMFHQRPLKDQSYLVGQCELEPTEKRAPLRLLAAQRFRILGFVNNLRLRLEDGNERKLTPNERAVLLDLCEKAEKLSLAAARRVLGLSTAQRFTIEEGGEKNVPVNLTATRLRAALGQAWDGLTAAQKDDLIEDVGDGKRCPTDEDLERCGREKWGWPQEVANALSKVRLPDGYGRYSLRALVALLPALEGGITVEEAIRAIPAYAETRNAAEPLPMLPPVRDLKAMLGEIRNPAVLRSLTELRKTVNAIIRRYGIPEQIHIELARDLKKSKKERQYQAELNREREKMRQEATEELRKYDAVRFANPRNTDIEKYLLAKEARWQCPYTNKKYGFTDVFGDHPQVDVEHIIPRSRSLDDSYVNKTLAYRSANAEKGNRTPREWLFESDQEQYEQMIRVVKQFDPRFEVGKKLRRFSMELSDPDSLLREFTERQLQDTRYASKLACRYLGVLYGGTIDASGKRRVFASAGQVTAKLRRAWDLDRILSPDKPEKCRDDHRHHAIDALTVALSSTTLIRELARAAGEADRLFRRKIILPVPWVGFGEQTRSAVERIQPSHRPMRKLAGPLHEETFYSRPRKEAVGTDKKGNPIKKEFVHYRVPVTSLASAKDFESIVDSHVRAAVKEKAAQLGGGGNKFEKNWPALVTRKGQTVPIRRVRIRKVQSVVSIGKDERKRFVVPGSNHHAEILKELDANGRVKRYLCETVTMLKALERKRQGVPVVSRDHGPGYKFHCTLSEGDLVEARGPGDEALRIWKVRTVRDSQQLALTPALDARPKADVQKDGMWSPRVNSLFLGG

SEQ ID NO: 9392 - protein, 919 aa, synthetic construct
  REGION 1..919: note = Synthetic
MAAVAPPSFRPGLTLGIDLGTNSLGTALVRTDLDLIEFMGVRVFPAGVEGNLEEGKEESRAAKRRQARLARRQTQRRQRRMYKVFHLLQRMGLLPAGNRVEVLDRLQHELEQRYPETTVLPWFLRARALEHALAPHELGRALYHLAQRRGFLSNRVGGKEDDKERSEVKATIKGLAEAIEAAGKRTLGEYMASLGAREKLRNSAESSGHYTHRSMFEHEFALIWDSQRVHHPEILTENRRAALHHAMFHQRPLKDQSYLVGQCELEPAEKRAPLRLLAAQRFRVLGFVNNLRLRLDDGNERKLTPNERAVLLDLCEKREKLTIAKARSEIGISKGQKFTIEEGGEKNVPVNLTATRLRAALGQTWDGLTPLQKDDLVEDVGDGKRNPTDEGLERCGRDKWGLPQEIAEALGKVRLPDAYGRYSLRALVALLPAIEEGLTVEDAIRALYAGARKSAEPLPLLPPVRDEKMKTLLGEIRSPAVQRSLTELRKTVNAIIRRYGLPEKIHIELARDLKKSKKERQKQTEINRDREKLRQEATGELRKHDVVRFANPRNSDIEKYLLATEARWQCPYTSKKYGVTDVFGDHPQVDVEHIIPRSRSLDDSYLNKTLAYRSANMEKGNRTPREWLFESDQEQYDRMIGVVSGFDPRFEVGKKLRRFSMELSDPDSLLKEFTERQLQDTRYASKLACRYLGVLYGGTSDASGNQRVFASAGQVTAKLRRAWDLDRILSPDKPEKSRDDHRHHAIDALTVALSSTTLIRALATAAGEADRLFRRKIILPVPWVGFGEQARSAVENIQPSHRPMRKLSGPLHKETFYSRPRKHAVGTDRKGKPIEEECVHYRVPVTSLSSAKSFESIVDSRVRAAVEERAAQLGGGGNRFEKNWPELVTRKGQTVPIKRVRIRKVEASSRSARTGESDL

SEQ ID NO: 9393 - protein, 1059 aa, synthetic construct
  REGION 1..1059: note = Synthetic
MAVVPLPSFRPGLILGIDLGSNSLGTALVRADEDLIEFMGVRVFPAGVEGNLEEGREESRAAKRRQARSARRQTQRRQRRLYKVFHLLQRMGLLPAGNRAEVLERLQCELRQRYPGTAVLPWLLRARSLDQALTPHELGRALYHLAQRRGFLSNRVGGKENDKERSDVKAAIKDLAAAIEAAGKRTLGEYMASLAPGEKLRNSPEFAEHYTHRSMFEREFAMIWEAQREHHARILTEDRRANLYRAMFHQRPLKDQSYLVGQCELEPAEQRAPLRLLAAQRFRVLGFVNNLRVRLEDGSERKLTPNERAVLLDLCERREKLTLAKARNEIGISQRQKFTIEEGGEKNVPVNLSATRLRAVLGQGWDDLTPGQKDDLVEDVGDGRRCPTDEDLERCGRDKWGLAQEIAEAMSKVRLPDAYGRYSLKALAALLPALEEGLSVEEAVRALPAYAETRRAAEPLPMLPPLQDEKMKKLLGEIRNPAVLRSLTELRKTVNAIIRRYGIPEKIHIEVARDLKKSKHERQQQTELNRDREKLRQEATEELRKHDAVRFASPRNSDIEKYLLATEARWQCPYTSRRYGFTDVFGDHPQVDVEHIIPRSRSLDDSYLNKTLAYRSANMEKGNRTPREWLFESDREQYDQMIRVVKDSDPRFEVGKKLRRFSMELSDPDSLLNEFTQRQLQDTRYASKLACRYLGALYGGTIDASSTQRVFASAGQITAKLRRAWDLDRILSPDKPEKCRDDHRHHAIDALTVALSSTTLIRQLATAAGEADRLFRRKIILPVPWVGFGEQARRAVENIQPSHRPMRKLSGPLHEETFYSRPRKEAVGTDKKGKPIEKEFVHYRVPVTSLASERDYESIVDSLVRTAVEEKAAQLGGGGSRFEKNWPALVTRRGQSVPIKRVRIRKVQAVVAIGKNERERFVVPGKNHHAEILAELDANGRVKRYRCETVTLLEAMERKRQGVSVVTRDHGPGLEFRCTLSEGDLIEARGPNEATPHVWKVRTVRPSQQLELSPALDARLKKEIGNDGKLWSPSVNPLFRGGARKVLVTTLGEIISAND

SEQ ID NO: 9394 - protein, 993 aa, synthetic construct
  REGION 1..993: note = Synthetic
MKKILGLDLGTTSVGWALIEKDKTGGSFLGGGVRIFTSVTEDKTNNLKNQKRREKRGQRINIQRRSKRKTALKKALVEVSLLPNEVLNASKAPEALNAISTNPYELRARALDDALSDHELGRAILSLGMRRGFLSNRKSGDSDSSVVLPAINSLQSEISESDCRTLGEYLAKQPTQRGRYTHRSMFALELDAIWKKQSEINKKLTPALREKIEHYILYQNPLKIQKYLVGECALEPNKRRAAKWQPMAQLFRNWQDVSRIKTSHDSQPLEWEQQKKLVDELQKKKTLKWNSVRKLLELDPDTKFNLEESGSLKELKGNDTVINLNKALGKKAKELSEAEKEKILNWLDTSDNDEKLKEKINRGFDFDEKTIDSLCKCSLAKGYYHLSVKACGKLVDIFETNKEPLSYREAGEKAGYIMDESGAAGKGMDRLPHPPEIRNPVVEKALVELRKVVNGVIRKYGKPDNIHLEIARDLKQPKKVREEIQRKNKKQEKIREEAKGILISDFRAFKTSEPDRDAIEKYLLWKECFEDGNGQCPYTGQVISGDMLFTNDIQVEHIIPYSRSFDNSFNNKTLCVSTENARKGNSTPYELYNGTDQYDEVLARVAKFPYPKRQRFKLKEAPENPDAQRTLNDTRYISKEAKRFLQKLGTMVQVSTGQMTAGIRRKWNLNGLLSKGGDNTKNREDHRHHFVDAAVVANINVGMIQMISKYSGDERLQRAIPRGIFSLKTLFKEPWDSFSKDLETHLNEIVVSHSPTRKISGGLHEDTALGIVQTKEGTAFANRVELNKTFTTKKVKNIADDKIRELVSARLERFEDDPEKAFADLENDPIYHVDGTTPIKRVRLHTNESMSSLTGIKQNGSVYAYYRKGNNYQVAIYEMPDGKWKGHYITAFDAKSKNTKPTKGFVSGKLIMELCKNDMVEMDWKDGREIFRLQKMSGVKNELIFRLHTSGQKSNAERDTLKNLTSNSLKSTNPKRIEVSPIGEVIYVSKQNC

SEQ ID NO: 9395 - protein, 999 aa, synthetic construct; identical to SEQ ID NO: 7640
  REGION 1..999: note = Synthetic

SEQ ID NO: 9396 - protein, 993 aa, synthetic construct
  REGION 1..993: note = Synthetic
MKILGLDIGTNSIGWAVIERDDEKLDDVAGTGKILGAGARVFTAPVEDKTEAPKNQERRAKRGARKILARRKMRREHLTNILVSTEMLPSDKDEREKLLNTINPYKARAEGLDGKISLYELGRALFHMNKRRGFKSNRNADRKEKDKDKSKVLDAIKDLQGRIDHNARTLGEYLYKQNNSLLRKQYTHRNMYETEFEKLWATQAAFHPELTQELKIKINKAIFFQRPLKSQKGLVGFCELERKIWRKPDGGLIDKGPRRAAKSHPLAQRIRMLQDVTNLKVNAQSLKKDQLKTIIEAIDGKQKLTWAQVKKSAGIHKETKLNLEETGKKHIPGDYTSFNIAKALGAKWQALDVTQRESLYTDLTTIENEAALIKRLTEGWGFSKDESEALAKVELEDGYAAHSLKAIKKLLPHMEAGLTYPEAKIAAGYGGVSGASEGFNVLPEPPQVRNPVVQKALYETRKVVNAIIRKFGKPDIIRVELARDAKQPKKVKDERHKQMRDREAENETIDAELKNEFGVAKPTREDRDKYRLWLECNRTSPYSGKAIGKQELFTADVQVEHILPWQKSLDNSYMNKTLCFQKENLEKGDNTPFQAWSHDEQKWGEIEKRIESLPLAKRRRFYMTEIPDGFLDSQLTDTRYITKEVCAYLKSTGVRVDTNKGLFTAWLRGEWGLYDILPKRNYDLKAGKDRSDHRHHALDAIVIALTGPWQVHMFSRATSRGDGRLRYSNFPVPWKGFRDDAQAAIDAIIVSHRATRKIRGALHEETSYGATSEKGVFVRRKTIETMTYAEVKRIRDERIRDLILKRIEEHGGDCKAALKTEFVIGKHSVKKARLLYSINNAFPILDKKGKEYRFLEYGKNHHIEIIKPKSSGKWEGWEEGDIVTMMEAARRARPRKGEEKRPIINTICGPDNELVMSLSINEMLRMNVDGDVRIYRVQKLSKGYYVFREHCSAGTEDETKPAMLRIQSMGALMSYKPEKVTVSPIGEVFPAHD

SEQ ID NO: 9397 - protein, 989 aa, synthetic construct
  REGION 1..989: note = Synthetic
MKILGLDIGTNSIGWAVIERDDEKQDDVAGNGKILGSGARVFTAPVEDKTEAPKNQERRAKRGARKILARRRMRMLSLANVLISAGMLPAYFLDNEAERLKLCNSINPYQARTDGLERMLSLHEFGRALFHMNKRRGFKSNRKADRKEKDKDKSKVLGAIKELSKKIGGDTLGQYLYSQNGGISIRKQYTHRDMYETEFDKLWAVQSAHHSALTQDLKVKIHRALFFQRPLKSQKNLVGFCDLEKKLWKTPEGRFIDKGPRRAAKSHPMAQRIRTLQDITNLKINGAPLNETQRKDIIVAIDGKEKLTWAQVKKVAGLHKETKLNLEETGKKHIPSDYTSFNIARALGGKWGALDEAKRECLYTDLATIENEAALIKRLTGAWSFSKEEAEVLAKVELEDGYAAHSLKAIKKLLPHMEAGLTYPEAKIKAGYGAVSGASGGLGQLPEPPQMRNPVVQKALYETRKVVNAIIRKFGKPDIIRVELARDAKQPKKVKDDRLKQIRDREEENETINNDLKNEFGVAKPTREDREKYRLWIECNQTSPYSGKTIGKQELFAADVQVEHILPWQRSLDNSYMNKTLCFHTENLGKGDKTPFEAWGHYEQKWGEIETRIQNFPPSKRRRFYMTEIPDGFLDSQLTDTRYITKEVCAYLKTTGVRVDTNKGLFTAWLRGEWGLYDILPRRNYDLKAGKDRSDHRHHALDAIVIALTGPWQVHVMSRATSRGDGRMRYSNFPAPWPNFRDDVKTAIDEIIVSHRATRKIRGALHEETSYGATSEKGVFVRRKAIESMTPGEAERIRDARIKDMVQKRIEEHGGDYKAALKTEFVIGKNPVKKARITVNMGVDTVFPIKDETGKAYRYVTYGNNHHIEIVKNLKTGKHEGVVVTTMEAARRARIGKLAIIQRDHGADYEFVMSLSINEMVKIPVDGGFEYYRVQLLNQTSKQITLRKHTSADITDNSTRLMPVPSSLLGTGAQKVIISPIGDVFPAHD

SEQ ID NO: 9398 - protein, 1012 aa, synthetic construct; identical to SEQ ID NO: 6855
  REGION 1..1012: note = Synthetic

SEQ ID NO: 9399 - protein, 1005 aa, synthetic construct
  REGION 1..1005: note = Synthetic
MGEVKHSTQILALDIGTASLGWALVQTDDSHLDGGVLALGVRSFEEPVEPKGREPKNVKRRTARGLRKTLYRRALRKQVLRALLTKHQMLPESEAAFKDLCGHDPYELRTRGLSEKLTLAELGRALYHLGQRRGFLSNRKSRGLDRTGIAEVDELIELDEQAELSRAKSEKATTEDGVVLAGIASLVEEMEHSRARTLGEHFHRQLSQKQRVRARHTRRDLYQAEFEALWSAQRSHYPEKLTDALKLQIERTIFYQRPLKDQAHLRAKCELEKGNSVVLRAHPDFQEFRIWQDLANIRLKDLRDFSERRLTLEERRVLVDLLQNQPKLTWTQFRTKLKLGKKDALGINIEDGGAKDLVGNVTLCRLTEATGGEWSRWDRPTQNEVIDVLLGAGTDATKLKKLVNDLQVDPKLAYRIMLTTLPEGTGNVSLRAVRKLLPFMREGVDTYDARLAAGYTPEHEKVLGDRPIIDWIDLPDSLRNPGVSKCLHETRKLVNAIIRKYGKPDQIRVELGRDLALPRQARIDISKAQKRLEASNAEAREAALKQGIPHPKRADLIKYRLHQECQGVCPYTGKTITLETLFGDQWDIEHIIPFSVSLDDSFGNKTLCDAEFNRNVKRNRLPSEVFAGQPDAWNEALRRVNEFKCGRHKKKLFAMERADLPEDFQSRQLNDTRYASLQARDFLEKLGVPVHTSAGKHTAVLRRHWGLHTVLSEDGAKNRDDHRHHAIDAVVIALTTPAYIKRISDLYKAGGSLEHSPHRVPQPWPELRNQVKHLIEDVIVSHEPTHKIRGALHEETGYGRNHEGKMTTRKALVTLTEGEVGRIVDTALRSRLEEHIYNNPGKLDAALETFRVIDAQGESHRVNRVKIYAKGQNLEKYFQTERGFFPAGGNLWLLVMEEPATGKLDAKVIPLWRAAQLKHQKLGPAALVPPGWRLLHVLHKNDIVEIGGENPGIYRVVKFSEDPIDITFRKTHDASQSDETKLRFQSPKRLGEIIRRLRVGMIDVS

SEQ ID NO: 9400 - protein, 812 aa, synthetic construct
  REGION 1..812: note = Synthetic
VQEIIERKEAEERLKELEALQRKREKAAAKGKDANAPEDEKVVLAAIAELKQTLENQGLRTLGEYFHQRLQKGLPVRRQYTERGMYQYEFNALWTAQAQFHPALNDDELKAQFFHAIFFQRPLRRAVGVVGACQFEKSRNRAPKANPISHEFRIWQQLNHLLYLPEGSSDWLALALEQKQLVADALHETKELSWSKFRALTGIKKTAQINPEPNESERITGLKSLAGNATHIELVKRTGGRWTEMNEDERAALFEDLHTIDHKGKLVRRLRQHWQFTPEETYDLATLELEMGHTMLSTRAMRRLLAHLKQGLNYHDAVVAAGYEHNYQKEIAVKEQLPEVPKAITNPVVRKALNETRRLVNAIIAEYGLPQAIRIEMGRDLALNKKDRQEIEKANKPDLQKYRLWIECNGVCPYTGREIGLNQLFTQDIDIEHILPFSRSQDDSMANKTLCYARENREVKRNRTPYEAYGDSPQWEEMRQRVARFKCGRHKKKLFALTAIPEGFSARQLNDTRYIRLDHRHHALDAVVVALTTLSLSQRITRAAQGHTGGFFDGAWRVPEPWEGFRHDVRQALNKVVVSHQLNRKVYGALHEETAYGRRAADGSFVVRKPVQSLTGAEIERVIDPTLRERIRAWVEEVGPKRQASEPFYFVNRHGEKVEVRRVRVRARAADPSKMFAVRDDAGRPVKYHPYGSNHHVVIYEHRVTGERNAEVITMVEAARRGAQREAVYQPRPPVGWRTVMVLHKGDAVTIDESDSVYVVRRFNVENPLDMFIREHLTGDDSRDFRIRGTAGLAKLARRVKIDRLGRVWPDP

SEQ ID NO: 9401 - protein, 1026 aa, synthetic construct
  REGION 1..1026: note = Synthetic
MTSRGRTCILGLDLGTNSIGWALVDEAQQEVAAMGSRIFSTPMEPDKKDVPKNAARRAKRAARRLTRRRVIRRNQLLTLLRQHGMIPAENQADWHQIEPYALRAKGLDEALTLEEFGRALFHLAQRRGYQSNRKSAGLSDVEDPAVQEIIERKEAEERLKELEALQKKREKAAAKGKDPNAAEDEKVVLAAIAELKQILDSQGMRTLGEYFHHRLQKGLSVRRTYTERGMYQHEFEALWTAQTRHHPVLLDDELRAQFFHAIFFQRPLRRAAGVVGACQFERCRNRAPKANPIAHEFRIWQQLNHLLYLPEGSSDWVALTQDQKNTVAAALQEAKELSWSKFRTLTGIKKTAQINLEPNETERITGIKSLSGNATHIELQRRTNERWSYMTEDEQAALFEDLHTIDHKGKLVRRLRQHWQLSPIETYDLATLELEMGHAMLSTRAMRRILVHLKQGLNYHDAVVAAGYAHNYQKEVSVKAELPEVPKSITNPVVRKALNETRRLVNAIIAEYGLPQAIRIEMGRDLALNKKDRQEIEKANRRNAELNQQAKAACQAQGIAHPSPTDLQKYRLWVECNGVCPYTGREIGLHQLFTQDIDIEHILPFSRSQDDSMANKTLCYARENREVKRNRTPYEAYGDTPQWEEMRQRVARFKCGRHKKKLFSLQEIPTDFSARQLNDTRYIAKQVLQYGQDLGCEVTVTTGKATAALRHHWGLNPLLGEDGQKNRLDHRHHALDALVVAFTTLSLYQKIARAAQGQMGGYFDGTWRAPEPWDGFRHDVRQALDKVVVSHQINRKVTGPLHEETAYGRHKQDGSFIVRKSVNSLTANEVERIIDPTLRERVQAWIEEIGPKRQASESFFFVNRHGEKVEVRRVRIRARAADPSKMFSIRDEGGQPYKYHPYGSNHHAVIYEHKVTGERSAEVVTMAEAARRGAQGEGVEQPRPPVGWRTVMVLHNGDVVRWEDDELYRVTTIAAGEPVFMRLQFITYAKPTLLQQYDRVVTNPTGLRRLVERVRIDRLGRVWPDP

SEQ ID NO: 9402 - protein, 1029 aa, synthetic construct
  REGION 1..1029: note = Synthetic
MERVLGIDVGTNSVGWALVRLDDNPCVEGMGVRIFHEAVEPKDRKPKNAARRAKRMLRRQIRRRAQRRRAITAICQRYGLLPTNPIELHALLCDEARNPFRLRAKALDERLDLEELGKVFLHLGAHRGYRSNRKALLSKALSDPDLRQAASEFEEDRKRRAAARSSRRNSPEEDALDEEEGRVLQAIAQLEQEMKESGSRTLGEHLARVLAAGGKARRGSSETANYTREMVEAEFEAIWEAQARFHPVLNDRLQALLHRAIFFQRPLKVRRRGVERCPFEPFRNRAFKAQVIGQTFRAWQQALSLKWKPAGSREDFRQLDIDQVRLVAQHLLENAELSFSQLRKLLGHPRDAEYNLALGGRKTLSGSETSVRLRRILGDAWDRMDELEKDRLVHELVHSESMDSLANRLRKAWGFDPKTVYRLITTELPTGTASLSAKAMRKLLPLMQAGKRYDEACMEVYGRLGPKLEENLEAQLVPMPTEGANPVVHRALVEVRRIVNAVIREYGKPDRVHVEATRELKLRKADREKLQRQQRDNERDNREATQEFVRLHPGREPRRADLEKYRLWKESGGLCPYTGRCIPLEMLWTAEVDVEHIIPLPRCWDDSFRNKTLCMAAENQRKGNRTPREAYSPDELAVILERLEKHTSMPFGKRRLFQIEWNDQKADDFLNRQLRDTSLATTLARRMLVPIFGDTNVLCLPGRLTAFLRHHWGLQTVLGSETKNREDHRHHAVDAVVIALTSRSLLQRAATFAAKHGHENLDHAIKSEAPIPDVRDQVVRLIDQVVVSHQTTRRARGGFVEDTAYGKVQPGMYLYRKPIGSLSDGEIAKVRDPGLRKRLEAVGSTALQKRAKEDPNKPFTYLDRYGRERVVRSVRLLVRASDRSMVPVGPSHYASAANHHVAVFEVNGERRYVVVSLFEVYRRLREKLPVYDRHALPGGRFLFAWHANDTVVVEGRPEKYYRIASFSDDDPEGHRKIDMELWPVNRAVGSESRRAPNKAAPFETLRCKSPSTLRLVSGPVSVDALGRVR

SEQ ID NO: 9403 - protein, 1029 aa, synthetic construct
  REGION 1..1029: note = Synthetic
MERVLGIDVGTNSVGWALVRLDDNPCVEGMGVRIFHEAVEPKDRKPKNAARRAKRMLRRQIRRRAQRRRAITAICQRYGLLPTNPIELHALLCDEARNPFRLRAKALDERLDLEELGKVFLHLGAHRGYKSNRKALLSKALSDPDLRQAASEFEEDRKRRAAARSSRRNSPEEDALDEEEGRVLQAIAQLEQEMKESGSRTLGEHLARVLAAGGKARRGSSETANYTREMVEAEFEAIWEAQARFHPVLNDRLQALLHRAIFFQRPLKVRRRGVERCPFEPFRNRAFKAQVIGQTFRAWQQALSLKWKPAGSREDFRQLDIDQVRLVAQHLLENAELSFSQLRKLLGHPRDAEYNLALGGRKTLSGSETSVRLRRILGDAWDRMDELEKDRLVHELVHSESMDSLANRLRKAWGFDPKTVYRLITTELPTGTASLSAKAMRKLLPLMQAGKRYDEACMEVYGRLGPKLEENLEAQLVPMPTEGANPVVHRALVEVRRIVNAVIREYGKPDRVHVEATRELKLRKADREKLQRQQRDNERDNREATQEFVRLHPGREPRRADLEKYRLWKESGGLCPYTGRCIPLEMLWTAEVDVEHIIPLPRCWDDSFRNKTLCMAAENQRKGNRTPREAYSPDELAVILERLEKHTSMPFGKRRLFQIEWNDQKADDFLNRQLRDTSLATTLARRMLVPIFGDTNVLCLPGRLTAFLRHHWGLQTVLGSETKNREDHRHHAVDAVVIALTSRSLLQRAATFAAKHGHENLDHAIKSEAPIPDVRDQVVRLIDQVVVSHQTTRRARGGFVEDTAYGKVQPGMYLYRKPIGSLSDGEIAKVRDPGLRKRLEAVGSTALQKRAKEDPNKPFTYLDRYGRERVVRSVRLLVRASDRSMVPVGPSHYASAANHHVAVFEVNGERRYVVVSLFEVYRRLREKLPVYDRHALPGGRFLFAWHANDTVVVEGRPEKYYRIASFSDDDPEGHRKIDMELWPVNRAVGSESRRAPNKAAPFETLRCKSPSTLRLVSGPVSVDALGRVR

SEQ ID NO: 9404 - protein, 1000 aa, synthetic construct
  REGION 1..1000: note = Synthetic
MQTRVLGIDVGTNSVGWALVRLGDEADVEAMGVRIFHEAVEPKDREPKNKKRRAKRLLRRQIRRRAQRRRAIAAICQRHGLLPRQEEELHRLLCDFQRNPFRLRAEALDRSLELNEIGRVMLHLGAHRGYKSNRKALLSRAFSDPEIREAAEELERERKAKAAAGKLKKEKADEEEEGRVLQAIAELERQMQEHGSRTLGEHLFRQMLDPTVGRARRSSADTANYTREMVEHEFEAIWDAQRRFHPILTDNLKATLYRAIFFQRPLKIRRRGVEWCPFERGRKRAFKAQVVSQTFRAWQQATSLKWRLPEIGAEWRNLSPQEMRTVAEALLTKAELTFSELRKLLRHPKDVEYNLAVGGRKSLSGAETSVKLQRILAERWEAMDELEKDLLVHELVHSDSMDALAARLRKRWGFDPKTVYRLITTDLPSGTTSLSAKAMRRLIPKMQEGQRYDEACEAIYNRRGPKIDANLEATKVPMPPERANPVVQRALVEVRRIVNAVIEKYGKPDEIHVEAARDLKLTKKQRENLQKTQRENERANKEAREAFQRLHPGREPSRADLEKYRLWKESGGRCPYTGRSIALEELWTASVDVEHIIPLPRCWDDSFRNKTLCDATENRLRKRNKTPREAYSEEDLQRILERLEGFSSMPRGKKNLFKLEWNEEAAERFTNRQLRDTSYATTLARRMLEPIFGQQKVLNLPGKLTAFLRRHWGLETVLGGEEKNREDHRHHAVDAVVIALTSRSLFQRMATFSGRYGAQNLEHAVSDASPITDLRNRVLRLLEGLVVSHQTTRRARGGFVEDTAYGKVEPGMYVCRKPVGSLSDGEIDRVRDIGLRRRLKAIGADALQEMAKRNPSKPFTYVDRKGRECVVRRVRLLVRASDRSMIPAGPAHYASAANHHVAVFDVDGERRYVVVSLYEVYQRLRERKPVYGDPRRALPLRLARERHGGGRGSPGEVLPGCEVLRRRPRTTPTSLSLAPAIAQSSGDRAEADPREGSDVG

SEQ ID NO: 9405 - protein, 1029 aa, synthetic construct
  REGION 1..1029: note = Synthetic
MCTRVLGIDVGTNSVGWALVRLGDDPDVEAMGVRIFHEAVEPKDREPKNSKRRAKRLLRRQIRRRAQRRRAITTICQKHALLPTDPEELHRLQCDYERNPFRLRAEALDRVLALHEIGRVMLHLGAHRGYKSNRKALLNRAFSDPEIREAAESLEQERKARAAAGKLRKEEQREEEEGKVLQAIAALEREMQEWGSRTLGEHLHRQMLDPAIGRARRSATDTANYTREMVEAEFEAIWESQRRFHAELSDKLKAQLYRAIFFQRPLKIRKRGVEWCPFEGGRKRAFKAQVISQTFRAWQQANSLEWRPSEIGAQWRKLTPEEIRVVAEALLAKAEVKFTEIRKLLKHPKETEYNLAIGGRESLKGAETNVRLRSILGDAWDGMDDLEKDRLVHELVHSDSMDALATRLRKSWGFDPKTVYRLITTDLPSGTASLSAKAMRKLVPEMQRGLRYDEACKKIYDRFGPDIKVNLQAKKVPMPPERANPVVHRALVEVRRIVNAVIERYGKPDAVHVEAARDLKLTKKQRDSLQQHQRRNELANQEAREQFQRLHPGREPSRADLEKYRLWKESNGLCPYTGRPIALEELWTGSVDVEHIIPLPRCWDDSFRNKTLCDATENRLRKKNKTPREAYSEQDLERILQRLESFSSMPRGKKNLFKLEWNEKAEESFTNRQFNDTTLATTLARRMLEPIFGREKVLCLPGKLTAFLRRHWGLETVLGGEEKNREDHRHHAVDAVVIALTSLSLFQRLATFSGRYGSEHLEHSISKVEPIPNLRDRVLSMLEELVVSHQTTRRARGGFVEDTAYGKVAPGQYVYRKPVGSLSDGEIDRVRDLGLRRRLKAIGSKALQDMAKKNPTKPFVYFDRFGRECVVRRVRLLANASDRSMIPIGPGHYASASNHHVAVFEVGGERRYVVASLYEVYQRLRRGEPVYDRSAIPGGRFLFAWHPNDTVVVEGRPEKYYRVVKFSDYDPERHRKVYLLVRPVHRAMETKQKQSPENARENADVLCNSPGTLLLVSGPVSISVLGQVR

SEQ ID NO: 9406 - protein, 891 aa, synthetic construct
  REGION 1..891: note = Synthetic
VPKRRGFVKMHKRVLGIDVGTNSVGWALVRLGDDPDVEAMGVRIFHEAVEPKDREPKNSKRRAKRLLRRQIRRRNQRRRAITTICQKHGLRPAEPQELHNLQCDYQRNPFRLRAEALDRALTLHELGRVMLHLGAHRGYKSNRKALLNRAFSDPEIREAAEELERERKAKAAAGRLRKEEQREEEEGKVLQAIAALEKEMQEWGSRTLGEHLHRQLMDPGIGRARRTAADTANYTREMVEAEFNAIWASQRRFHPELSDKLKAQLYRAIFFQRPLKIRKRGVEWCPFEGGRKRAFKAQVISQTFRAWQQANSLEWRPSEIGAQWRKLTPEEVRVVAEALLAKAEVKFTEIRKLLKHPKETEYNLAIGGRESLKGAETNVRLRSILGEAWDRMDDLEKDRLVHELVHSDSMDALATRLRKSWGFDPKTVYRLITTDLPSGTASLSAKAMRKLVPEMQRGLRYDEACKKIYDRFGPDLKVNLQAKKVPMPPERANPVVHRALMEVRRIVNAVIERYGKPDAIHVEAARDLKLTKKQRDSLQQHQRRNELANKEAREQFQRLHPGREPSGADLEKYRLWKESNGLCPYTGRSIALEELWTASVDVEHIIPLPRCWDDSFRNKTLCDATENRLRKRNKTPREAYSEEDLSRILQRLESFSSMPRGKKSLFKLEWNEKTEKSFTNRQFNDTTLATTLTRRMLEPIFGREKVLCLPGKLTAFLRRRWGLETVLGGQEKNREDHRHHAVDAVVIALTSRSLFQRMATFSGRYGSEHLEHSISKVEPIPNLRDRVLSMLEELVVSHQTTRRARGGFVEDTAYGKVAPGQYVYRKPVGSLSDGEIDRVRDLGLRRRLQALGSKALQDMAKKNPKKPFVYFDRFGRECVVRRVRLLANASD

SEQ ID NO: 9407 - protein, 1029 aa, synthetic construct
  REGION 1..1029: note = Synthetic
MCTRVLGIDVGTNSVGWALVRLGDDPDVEAMGVRIFHEAVEPKDREPKNSKRRAKRLLRRQIRRRAQRRRAITTICQKHALLPTDPKELHRLQCDYQRNPFRLRAEALDRALTLHELGRVMLHLGAHRGYKSNRKALLNRAFSDPEIREAAESLEQERKARAAAGKLRKEEQREEEEGKVLQAIAALEKEMQEWGSRTLGEHLHRQMLDPAIGRARRSATDTANYTREMVEAEFEAIWESQKRFHAELSDKLKAQLYRAIFFQRPLKIRKRGVEWCPFEGGRKRAFKAQVISQTFRAWQQANSLEWRPSEIGAQWRKLTPEEIRVVAEALLTKAEVKFTEIRKFLKHPKETEYNLAIGGRESLKGAETNVRLRSILGEAWDRMDDLEKDRLVHELVHSDSMDALATRLRKSWRFDPKTVYRLITTDLPSGTASLSAKAMRKLVPEMQRGLRYDEACKKIYDRFGPDIKVNLQAKKVPMPPERANPVVHRALMEVRRIVNAVIERYGKPDAIHVEAARDLKLTKKQRDSLQQHQRRNELANKEAREQFQRLHPGREPSGADLEKYRLWKESNGLCPYTGRSIALEELWTASVDVEHIIPLPRCWDDSFRNKTLCDATENRLRKKNKTPREAYSEEDLSRILQRLESFSSMPRGKKNLFKLEWNEKAEKNFTNRQFNDTTLATTLTRRMLEPIFGREKVLCLPGKLTAFLRRHWGLETVLGGQEKNREDHRHHAVDAVVIALTSRSLFQRMATFSGRYGSEHLEHSISKVEPIPNLRDRVLSMLEELVVSHQTTRRARGGFVEDTAYGKVAPGQYVYRKPVGSLSDGEIDRVRDLGLRRRLKAIGSKALQDMAKKNPKKPFVYFDRFGRECVVRRVRLLASASDRSMIPIGPGHYASASNHHVAVFEVGGERRYVVASLYEVYQRLREGKPVYDRSAIPGGRFLFAWHPNDTVVVEGRPEKFYRVVTFSASDLEAHRHIDLELRPVNRAVGSESRKSPKLAEAGADLRCKSPGTLALVSGPVSVTALGEVR

SEQ ID NO: 9408 - protein, 1043 aa, synthetic construct
  REGION 1..1043: note = Synthetic
MKSTLGLDLGTNSIGWAWLDLEDSGEGSIRGCGVRVFSSPVEDKTKTPKNIARRAARGQRKVIRRRRMRLDNLTSVLVGAGLLPDDSVQREALFSDHNRNPYLLRRDALMRELEPFEIGRAIYHLCRRRGFKSNRKTLLGELASDQEVQALVEEDEEKQAAEVGSRSISAEEKEEGEMLASIRQLREKMGGRTLGQYLADELEAGNGVRRIHTERSMYEEEFNAIWESQRRFHSNLLGDSLKLRVYSAIFDQRPLKIQKSSIGFCRFEPKRKRAMKALVVAEDFRILQDLTNIRLFDQVSQTERRLSRDEMLRVLGLLRSQASMTWSAFRKALKLPKADVIEINLEEGGKDKLIGNRTLVSLTKILPNWNELTLDQQRELQTDLLTIPRRDSLYRRMRRHWQFDPRTAYELAILQLIPGTASLSAKAMQRLVEKMLDGLDYHDACQAVGYQRDDQRELELVERLPEPPDARNPVVNKALIEVRKVVNAIVREYGKPDLIRVEMARDMKLSKDQKEEIQKMNRKLKQLNEEAEEAIKQVRPDMVNPTRDDKLKYRLWKECGGVCPYTGTTIGLNMLFSADVDVEHIIPYTLCLDDSFKNKTLCMAHENRLVKKNRTPLQAYGGTPKYDEILQRLRNMKDMPLGKRKRFEMDNVNFDEFASRQLNDTRYICRQVKDYLMQLVGRDNVQVTKGEATGALRWNWGLNSVIGDSDEKSREDHRHHAIDAIVIALTSMSLLKKLSDVTSKGGSLTLKRNFDHQTIHVPEPWPGFRHDVEDHIKRLVVSHAPTRKLSGALHEDTAYGLIRHPKTGEQVFAYRKAISKDMTPGEIERIIDDRIRKAVMDRVAQHGHGKDAIKAALGDPDNPITIVNRYGKTVPVKRVRLFMRRGFEAMHPIDEGNGAYKYFPYGNNHHVEILECLCEHRDVDGKLWRVGDRRGVFVTTLEAARRARRAKVPIVQRDHGPDWRFVMSLAIGDYVAWHGDNAGLLVVGAMGGGENWEINLRPICLADASNRGAQVRVRSLPGLGKIGQKLQVDPIGRLTASND

SEQ ID NO: 9409 - protein, 1042 aa, synthetic construct
  REGION 1..1042: note = Synthetic
MSTKTILGLDIGTNSIGWALIAADEHLEPNSLIDCGVRIFEKPVNAKDQTPLNAARRKARLQRRQLSRRKARKIATQKILQAQKLLPIDQDELEKLMLDDVFFNPYALRAKALNEKLSDFEIGRVLMHLAQRRGFKSNRKTLLAEAIKSLPEIAAILEEEEQLEEKQILEVDQKSKKKQSKDSEEGIIKSGISQVRQSLLASNSPTLGVFLNKIRLGEIERPTSDGTQKTIRGLYLDRAMYEHEFEAIWTIQSRHNPIILTDALKAALYKAIFHQRPLKTQKFLVGDCVFEYHRKRAPKATLEFQKYRILEQLTNIRIKDPLTRRERPLAYEESESLFQELQTHNEVSWRRVRKIIGLHSKEEINLEEGGKPKLLGNRVNTALLGALGEQWTTLTDERKSLLLTDLLTIHRKEDLIKRLIGQWKFTARQAYDLAILELEPGYCSYSIKALKKILSEMEKGLDVHNACSNIGYLAPTRRNSATSNQLSKAPNLRNPIANRALNQCRIVINALLKRYPRPDVIRIELARDMKLTKRQKEQAEKQNKRNRDLNDEARPYLQANGITQPSRNDLLKYRLWKELGGICAYSGKAIPISSLFTGEIEIDHIVPYARCWQDSYTNKTVCYAEENRIKRKQTPYEAFSSDPEKYREMLQRIYALDSVPLAKKKRFEEQDFKADDFLSSQLNDTRYICQEVRSYFHQLGIPVQITKGEATASLRRRWYLDGILSVDSSTKKNRADYRNHTIDAIVVALTSVSLFQLLSKLSGQSDLPISSRNFDLPLPWATFREDVDKQIREIVVSHAPDRRLRDAFHEQTAFGVTDQEGLYVKRIPLTSLKEKDVELISDKWVRNAIKQRFQNASSSDAKKIFAEPLFHADAKTQIRQVRLPKKIGSANMRTFQDRKGKYFKAYELGNNSHAELFRRNGKLDMRVVSMLEAANRVRRRKQPVVNKDDNFVMSLFKNDMVELTHESGKFIYKVIGLENSVDQRRLIMQLHTVASAWKDVDQIAPELREITFLKKVPSYYDARNLTKLRVDPLGKIEYSKNE

SEQ ID NO: 9410 - protein, 1042 aa, synthetic construct
  REGION 1..1042: note = Synthetic
MGEKTILGLDIGTNSVGWALISATDDLSPIKLIDCGVRIFEKPVNAKDQTPLNASRRKARQQRRQLARRKARKLATQKILLSKDLLPTVPEVLEKLMLDDINFNPYALRAKALETKLTPFELGRIFMHLAQRRGFKSNRKTLLTAAIKTLPEIAAIFEEEELDEQREFSEPKEKSKRKPKNDTEEGLIKGSIFLVNQGIRASNSATLGVFLNKIRLGEVPRPTADGTQKTMRGLYLDRSMYEHEFEAIWSSQKPHHSELLTDNLKADLFKAIFHQRPLKIQKFLVGDCIFEYHRKRAAKATLEFQKFRILEQLANIRIKNPLTRNTRSLDASEKTILFKELQNQNEMSWKKVRKLLGLHTGESINLEEGGKPKLIGNRVHTAMEAVLDKNWSTLDQASKSSLLTDLQTIHKKEDLIKRVMNHWQFSAKQAYNLAILELEPGYGSYSMKAMKKILGEMEKGFDVHQACENLGYLAPARRKPSDICLLQSAPNLRNPIANRALNQCRIVINSLIKTYAKPDVIRIELARDMKLTKKQKEQAEKQNKSNRTLNDEARPYLAASGITQAKRDDLIKYRLWKELGGVCAYSGKAIPMSLLFTNEIEVDHIIPYARCWQDSYINKTVCYVEENRLKKKQTPFEAFSTDVEKYREMLQRIYALEALPVAKKKRFDLQEVKQDEFLSSQLNDTRYICQEVRAYFHQLGIPVQVTKGEATAALRRRWYLDGILSLDSSTRKNRADYRNHTIDAIVVALTSVSLFQMLSKLSGSSDLPISNRNFDLPYPWPTFREDVEKRISSILVSHAPDRRLRHAFHEQTAFGVTSEENVYVKRIPLTSLKEKELHLIPDKWIKEAVQERFKNAMSSDPKKIFEEPLFHADGKTQIRQLRMPKRIGSANMRSFQDRKGNFYKAYELGNNSHAELFRRGGKLDMRVINMMEAANRVRRRRQSVVNREDNFVMSLFKNDMVELTHENGAFLYKIIALENSVDKRRLIMQLHTVASSWNETSSLPPELAEIAFLKKVPSYYEQRNIRKVSINPLGKKEYCKND

SEQ ID NO: 9411 - protein, 1010 aa, synthetic construct; identical to SEQ ID NO: 7359
  REGION 1..1010: note = Synthetic

SEQ ID NO: 9412 - protein, 1071 aa, synthetic construct
  REGION 1..1071: note = Synthetic
MQAGINQLQSVLNLPKLHVLSMQNFKKEFHMAKVLGIDMGTNSIGWCLIEEYVDKDSQLIDLGVRIFQRVLEDKQPIPKNRKRREKRLARRVLDRRARRKSRLKNYLIKVGLLPETLRFEPPEKILNSIGHPILKTFRVGDEIITRTCITNPYDLRRIGLEEPLKPHEFGRVLLHLCTRRGFQSNRKTLLGNLADDPDFLEAIAEIEAESGDDADKLLPKEKQRIEDEQTIKAEIAKLKDQMGSQTLGQYLAGLDPHERKRNRWTDRSMYRDELKRLWEKQSSFDPDRCTSEVYREIEHIIFYQRPIRFMKNRIGKCLLESDRPRAKRARLESQRFRYWQDLNNLQLEHATGETSILTLEQKQMIAQALERQESMSWGGLRKKLSIKQVKFNLEKSGTKMLFGNRTACALRKCIGVHWDNLSPENQIQLVEDISTIDNKKALKKRLQEHWNFSLPEIIKLVTVQFEPGYMNQSLKAIRALLPHLRKGLIYSDARIAAGYGYETLAPETVAGRLGPHPDIPNPVVSKALSQTRRLVNAVIAAYGKPDEIRIELARDLKMNAKDKERFEKQQKENQKANETAEEQYRNIRQNNHHLNLPGYPSRDDKIKYRLWGECKGVCIYSGNGISLTQLFSPEIEIDHILPFSRTFDNSFMNKVIVFSDQNRAKGNKTPYEHFSVAHYDEILQRARALPFAKRQRLMKRELKQPEEFISNQLNDTRYMSKLAQQYVQQLGIKVSVNKGGITAMLRSRWGLNEVLGTPDKNRTDHRHHSIDAAVIAVTGRRMYQRIATHLQQPENQRFGKPIRIPAPWEDFFVQLQQRVDSILVSHEVCRKVSGALHEETAYGLRPGENGEMRIVHKKKLDSSFNAKQIEKIYDPVLKEIIRNHFVKHGSNPKEAFSDDNFVVHANGRARIRHVLVDESRFNEDSYIAISNDQGKKPKFYPLGSNHHVEIFKIEKKGKPQYKGRFVSMLEASKRETIFKTPVVNTIGGDGETFVMSLCINDIVSITIKEKTLFYRVQKLNATSDRLYLRLHTAATLNNEEEEMGNAINSLITKYSMKKVNVNVLGKKIGND

SEQ ID NO: 9413 - protein, 729 aa, synthetic construct
  REGION 1..729: note = Synthetic
MSNKHVLGLDLGTNSIGWCLLEIDDHKKPVELVDGGVRIFQEAVEAKTRTPKNLQRRSARLTRRVLDRKARRKRKLRNFLISRGLLPDELRSTDKPEHVLNAIGEPYQLRKRALNEALHPHEFGRSLLHLCARRGFQSNRKTALMDLFHSGDPDVLEALRDMDLIDENDEEETKFKAEISALQAEIDASGLETLGAYLSSLPRNARKRAKRTDRAMYEKEFGLIWERQAPFDPAHYSDALRLAIHEIIFFQRPIKQKKDRRGKCVLEPSRPRAAIARLECQEFRYRQDINNLTALDRSTGEYRELDAGEKENLAKVLDQQQTLSWGKIRTLLGFNRRDKFNLEESKNKALMGNTTAAKIQAILSGQWNNMTKKERISLVEDLLTIKDRAALLKRLMSHWDFGKAIAIRLAVLEFEPGHSSHSLKVINALLPHMRNGSRYDQARVAAGYGYEEKSRKSHERLGEPPEARNPVVQKALYETRKLVNAVIREYGKPVAIRVEMARDLKNSKTGRAALDKQNKANKKANDEAAEQYAIIKANYPALNLSEFPSQEDKLRYRLWKESEERCMYSGEGISMARLWSPEVEIDHILPYRRSLDDSYMNKVICLATENRKKRDRTPFEAWGDTEQYEQIVQRARKFPVAKRKRIQQRDLDKIDDFISRQLNDTRYICRLTLGYLKTLGCDITITKGQMTALLRRHWGLNGLLGDSGEKNRADHRHHFVDAVVTALAD

SEQ ID NO: 9414 - protein, 1024 aa, synthetic construct
  REGION 1..1024: note = Synthetic
MGSRTVLGLDLGTNSIGWCLIREVEKNVPERLLAGGVRIFQEAVEAKTRTPKNKTRRDARLLRRVIQRRARRKRRLRNYLIKAGWLPSELGTTPNPEVLLNTIGDPYTLRKKGLDESLTKEEFGRVLLHICARRGFLSNRKTALMDLYRSGDPDVLEALSADLDQESEVELDDEAKAEETAFKKDIAELRDDIQSSRSRTLGEYLANLPLHERKRTRRTERKMYEDEFNQLWDAQQRLNPEWCSERERLATHEVIFFQRPLKLKKNRRGRCSLEPSRFRAAMATLEAQEWRMHQDINLLNYVDTSTGELLHLDESQRSLLTEKLSRQRSMTWGAARKLLGLTKKGKSKVEFNLERSKPALIGNRTAASVRNIDSEWWDELGAVQRTSLIEDLLTIKDRYALYKRLVEVWDKPPKVALKYASLEFEPSHASLSLKSIRALLPHLRAGMIYSKARVAAGYGYESEESTLLDRLGEPPETNNPVVQKALYEVRKIVNAIIRVHGKPDAIRVEMARDLKLTKKMKASAHKQARLNEKANRDAAAEHEKVRTANPHLALAEYPSRDDLLRYRLWKEADSLCIYSGKTISLTQLWTADIEVDHILPYSRTLDDSYMNKIVCVAQENRDKSNSTPFEMWGGNAATYDAIKQRSRKCPPPKQARMLRKDLDKIDDFISRQLNDTRYISRLALGYMSTAFPDVSVTTGSVTAFLRHQWGLNSILAESGKKNRNDHRHHFVDATVVALVNRRTHQIMAREASRADFDTGNARLSRLDVEAPIDDLRRVVEKMADDIVISHAVNRKISGAFHEATFRGLSADGGVTLRVSVDSTLREADIGKVVDPVLRKKLQDHIVKNSGTAKQAFSEPVDLGKGRFLRHVKIRTGNAPKEGAYMELKDRLGNVQRRAAYGNTHHVKLYRTIDGKVKADFVTAFEAASRAVDPDELVIDRSVDADEELISVFHKNDAALLNIDGGQRLYRIVKLDKTSKRMTLITNRAATDEYEKPMLKAVSTLVNNYGLAGVTIDLLGNVTPN

SEQ ID NO: 9415 - protein, 735 aa, synthetic construct
  REGION 1..735: note = Synthetic
MKTTLALDLGTNSIGWALLESDSQGNPTKLIDAGSRIFIKAVEDKTPTPKNVARRNARLARRLIQRRARRRKKLLNLLIEHHLLPTQANLDSQSREQELNLIGDPYQLRAKALDTPLTHHELGRVLYHLSARRGFLSNRKIFMGDLLDDPDAQDLLPELDQSDDAEETAFKKDISELRNHIKKSGARTLGEYLSQRPEHQCKRNRQHQGGLLRTDRKMYQEEFELVQSIQKQHFDLSDDFWSKVEHILFFQRPLKLKKGRIGKCSLEPNRYRCAKARLEFQQFRYWQDLNHLTYFEPYTQSDVSLSMEQKQKLADTLETKTRLTWPQARKLLGLEKSYLFNLEKSGTKDLVGNRTGYAIQQIIGDTWQQLSEQQQRQLIEDLLTIKKKTTLKNRLVNYWRLPLQQAIYLASEEFEPGHSDLSLKAINKLLPFLKQGHIYSDARIAAGYGYETKEITVFDKLPAPPNLRNPIVNKGLHETRKLINAIIATYGKPDIIRIEMARDLTLSNKDKTRLDKVNRDNLQKNKEAEEQYDITRQSFPHLGLRKYPSKDDKLRYRLWKEQGCRCPYSLKSISLQQVFSAETEIDHILPYSQSLDDSYMNKVLCFTDTNREKGNRTPYGAWASQPIKWEQLVANMLAIDKENKHAITAKKNRFLTKTTDEIEGMISSQLNDTRYLSREVFHYVKQLGCRVEVSKGILTAKLRHMWGLNHLLGSKDDHKERKDHRHHTIDAIVTA

SEQ ID NO: 9416 - protein, 1024 aa, synthetic construct; identical to SEQ ID NO: 4983
  REGION 1..1024: note = Synthetic

SEQ ID NO: 9417 - protein, 922 aa, synthetic construct
  REGION 1..922: note = Synthetic
MNAPVNDNSKKVLGLDIGSNSIGWCLLALEDNKPKRFIDIGSRIFNKGVEDEIPTPKNAKRRRARLDRRVIQRRSRRKRRLESYLMKLGFLPDTIRDTVSRERLLNGLGDPYELRSKGLDEKLDRHEFGRVLLHLVQRRGFLSNRKTAIGDLADDPDVMAILEEEDSLEAAEDKTEEGQFKQQIANLRESIKASGYRTLGEYLYRNEDLDSKRNRIRNGGDLRTDRAMYRQELQLIWNKQKESHADLTENMLEQIEEIIFFQRPLKFKADRIGKCSLEPGNKRSAFAKLEFQEFRYLQDVNNLSHIDPYTNKSTNLSAEQREKILILFEEKKNVTYPSIRKKLGFDKSYVFNLEAAENKKLKGNLTALTIAGVFPEWEEFDESTKVAFTEDMLTIKKRSTLFKRLQSYWNLTPEQSVPLCLLEFEEGHANLSLKAIRKLLPYMRKGMRYDEAREAAGYSYKDSDPKVLAKLPAPPTIPNPIVSRGLSEVRRLVNAIIKTHGKPDIIRVEMARDLEMNTKRYKQFESRQRKNTKANEAAEAKWGEVSSANPHLKLRKYPSRDDKIKFRLWEDQGKLCAYSCKVISMNQLFSDDVEVDHVVPYSFSLDDSYMNKVVCFARENRNKSQQTPIDAFEKNEEQWSQITGAIARWDRGLYSKVARFFLRSNEIEKDFTNSQLVDTRYIAKEALSYLALIGADVTTTKGVMTSWLRHHWGLNSLISESDKKDRTDHRQHAIDAAITACIDRPFYQALVKVAREIESSSAGLSMRDLHTNEPWDGFRSELDALIQDLIVSHQTSSKVQGALNEAFGVGYIEGVGTVYRKNVDPKLNVDKVIDPAVREILLSHLIKNHNDKKEAFAEGNPVYHKDNKTRIRRVRIKQASISFSKLEHQKMAIRDKTGRAFKWHAFGNTHCVRVFHNTETGK

SEQ ID NO: 9418 - protein, 1025 aa, synthetic construct
  REGION 1..1025: note = Synthetic
MSASVNHNERETALGLDIGSNSIGWALIELQEGRPMAIIDTGVRIFNRAVEDKIPTPKNAKRRQARLARRVIQRRARRKSRMQNYLISINLLPADLIATKDREKLLNALGDPYMLRARALDQPLAPHELGRVLLHLVQRRGFLSNRKSAMGDLVDDPDVLAVLREEDAEEELKPTNEEGQFKQQIAALRDRIKDSGYRTLGEYLHNNPDLESKRNRIRNGGDLRTDRAMYRHELESIWHVQKKFHDTLSANTLETIEDIIFYQRPLKLKSDRVGKCSLETKKKRCAIARLEYQQFRYLQDVNNLAYIDPNTDELRRLTDDQRSRVLPLFEVKKNVTYPQIRKALGFDKTYQFNLERAENKKLKGNLTAISIAEILPQWSDFNHLQKNQLVEDLLTYEKRSNLKDRLERHWKLDTSTAIQLCLLEFEDGYGNLSLKAINRLLPHLLEGKIYSDARLAADYGFEQEDINLDRLPRAPTLTNPIVNRGLNEVRRLVNAIIKVYGKPEVIRLEMARDLEMNTKRYKQFTTRQKKNTQSNDEANDKWNAYSKANASLGLRKYPTRDQKIKYRLWMDQNQRCAYSNQSIAINQLFSDDTEVDHIIPYSMSLDDSYMNKVVCFSRENRTKAQKTPIEAYGGDVEKWDQISQAIQRWDKALYSKVQRFYKRSDDLDQDFISSQLNDTRYISKEALVYVKKLGVDVTTSKGIVTSWLRHQWGLNSILSEDEQKDRSDHRQHAIDAIITACLDRPFYKAMVDTAKDLERSGSSLKMNDLVSDEPWEGFRHQLVERIQTMIISHQTSSKITGSLHEETGVGFIEGLGTVYRKPVSPDLNLDSVIDPTVKSILEKHLANNGGAVKIAFSDEKPVYHKDGRTRIKRVRCIQSKTSKDKLEKNKLAITDKNGAPFKWHSFGNVHSAQIYVQDDKYQTEYQTVYAAKRRVPNKLLNRTPVAVLHKNDAVTLLIDEQIQIFRVQKISFTNRTISLIPNRLAKQVIAKDIKILTLNDATINKHQLRKASINILGKVQSEANS

SEQ ID NO: 9419 - protein, 1025 aa, synthetic construct
  REGION 1..1025: note = Synthetic
MSASVNHNERETALGLDIGSNSIGWALIELQEGRPTAIIDTGVRIFNRAVEDKIPTPKNAKRRQARLARRVIQRRARRKSRMQNYLISINLLPADLIATKDREKLLNALGDPYMLRARALDQPLAPHELGRVLLHLVQRRGFLSNRKSAMGDLVDDPDVLAVLREEDAEEELKPTNEEGQFKQQIAALRDRIKDSGCRTLGEYLHNNPDLESKRNRIRNGGDLRTDRAMYRHELESIWHVQKKFHDTLSANTLETIEDIIFYQRPLKLKSDRVGMCSLEKKKKRCAIARLEYQQFRYLQDVNNLAYIDPNTDELRRLTDDQRSRVLPLFEVKKNVTYPQIRKALGFDKTYQFNLERAENKKLKGNLTAISIAEILPQWSDFNHLQKNQLVEDLLTYEKRSNLKDRLERHWKLDTSTAIQLCLLEFEDGYGNLSLKAINRLLPHLLEGKIYSDARLAADYGFEQEDINLDRLPRAPILTNPIVNRGLNEVRRLVNAIIKVYGKPEVIRLEMARDLEMNTKRYKQFTTRQKKNTQSNDEAKDKWTAYSKANTSLGLRKYPTRDQKIKYRLWMDQNQRCAYSNQSIAINQLFSDDTEVDHIIPYSMSLDDSYMNKVVCFSRENRTKAQKTPIEAYGSDVEKWDQISQAIQRWDKALYSKVQRFYKRSDDLDQDFISSQLNDTRYISKEALVYVKKLGVDVTTSKGIVTSWLRHQWGLNSILSEDEQKDRSDHRQHAIDAIITACLDRPFYKAMVDTAKDLERSGSSLKMNDLVSDEPWEGFRHQLVERIQTMIISHQTSSKITGSLHEETGVGFIEGLGTVYRKPVSPDLKLDSVIDPTVKSILEKHLANNGGAVKIAFSDEKPVYHKDGRTRIKRVRCIQSKTSKDKLKKNKLAITDKNGAPFKWHSFGNVHSAQIYVQDDKYHTEYQTVYAAKRRVPNTLVDRTPVAALHKNDAVTLLIDEQTQVFRVQQIDFTNKRISLIRNHLAKEVSKQDVKLLSLNDTNITKYQLRKASINILGKIQSEANS

SEQ ID NO: 9420 - protein, 1025 aa, synthetic construct
  REGION 1..1025: note = Synthetic
MSKTILGLDLGTNSIGWALFDANENLQPIDLVDIGVRIFQRAVEDKTPTPKNQARRNARLARRIIQRRSRRKHRMLNYLISLDLLPQSLQNNPQPEIILNYLGDPYALRTKALDHALKTHELGRVLLHLVQRRGFQSNRKTLLGDMVDDPDTLAVFSEEDGSIDDKEETAFKQDISVLRDKIEAENCRTLGEYLRQLPKDQVKRNRFREGGNLRADRKMYKDEFWKIIKAQTVHHPNLEDAQEELFSIIFFQRPLKLKKDRVGKCSLEPRNTRAKKSWNLFQRFRYLQDINSLEYFDSYTSHFNKLAEDDREKLVNFFEHDAKPTISKIKQTLGFSRNQKFNFESATNKFFKGNLTVISIREVYPEWDELSIEQQNQLEEDLISFESKKALKQRLINHWKLNIETAVKLCVVEFEPGHSELSLKAIKKLIPFLEQGLIFSDARQSAGYGYEFEEVIAQDKLLAPPELPNPIVMKGLHELKRVVNAIIKEYGKPDAIRLEMARDLEMNTRRYKAFTNQQNKNTRLNEEAQEKFSGIAKKNKHLGLSKYASHTDKLKYRLWQEQENRCAYSNKQISLTELFTGNIEIDHILPYSLTLNDSYMNKVVCIAQENQTKGQRTPRESFESDKEKWEQIEAAISRWYTKDLSGKRNAFYKNTDDLDKDFIGSQLTDTRYISREALHYLKTLGVEVSTVKGQVTSWLRHIWGMNSLIDDNKKEKDRTDHRHHSIDATVIACIDQSLYNTVVKMAQKLEKQPGSFHIKDIHLDPLFDGFRQQVAQRLGKIIIAHAPERKLSGALHEDTGIGFIEDTGAIYRKNVDETLTTKSIKNIIDPTVRDFVEKHLQRHGGTPKKAFTKDKPVLHKDGKTPIKRVRILQSKTTKKQLKQSKLGIKDKQGKVFKWVTLGNTHHVEIFRHNKTVKYQSVFVTTLEATNRAHSRKSIINRMLDDDHEFCFALHRNDLVQVNVNGSEAIYRVQKLNSPGNATLRNHLASTLDDKRQEIRKSISTLMKDYELKLIRVNCIGKPLDD

SEQ ID NO: 9421 - protein, 1035 aa, synthetic construct; identical to SEQ ID NO: 5010
  REGION 1..1035: note = Synthetic

SEQ ID NO: 9422 - protein, 1035 aa, synthetic construct; identical to SEQ ID NO: 4976
  REGION 1..1035: note = Synthetic

SEQ ID NO: 9423 - protein, 1004 aa, synthetic construct
  REGION 1..1004: note = Synthetic
MINKKVLGLDFGTNSLGWALLSIDENKNESSIIDGGVRIFPKGVEDKTPTPKNQKRRNKRLGRRVLQRRARRKLKMLNTLISHGLLPLAAKTDKLEKILTDLGDPYILRAKALDAPLQAFELGRVLYHLVQRRGFLSNKKVAVGQDMLNDPDVLDAMADLGLDETDDAEETDFYADIYQLQANMKELGSRTLGEYLATDISLPTKRNRKGTHLRTERSMYVNEFHAIIDVQRKHHSCLTEEVIERLYSTIFHQRPLKFKKSSIGQCSLEPKKRRIEAGRMEYQRFRYLCDVNNLSYFDNELETNVFLSGEQRATLISLFETQADISFAELRKALGLSRTTKFNLENGGVKKLKGNRTAAEIIAVYPEFENLSHEKQTAFVEDLVSFEKKVPLKERLKNYWGLAPETAVKVAILELENGHGNLSLKAINKLLPHLEEGLELSQARIKVGYGYEVEESNLDLLPAMPELPNPIVMKSLGAVRKVVNEIIKKYGKPDSIRIEMARDLEMNTKRYASFTKQQKDNTKANDEAAAIFKKVTGLNHCSRDNKIKYRLWKEQGGICIYSGSVITEKALFSAQTEVDHILPYSQSLDDSYGNKVLCLARENQEKGQKTPIDAFGGQEEKWSGIAKRIAKYDLKLRGKKSRFYMKAKDMLQRDFLGSQLTDTRYISREAGQWMKKLGCDVTFTKGAITSHLRHSWNLNTIINEVDTKNRRDHRHHMIDAVAIACVDRQLYKAMIAQLKDLERTKSELSLSDIYFEQPIDNLREKLVELVDNTIVSYTNTSKPTGAIHEETGVGYVTDIGTVTRKRLDESFEAKNVSKIYDEGVRKLVTEHLAKYDNNPKIAFSSDNPVLHKDGKTPIKRVRIKQADTTPKKLESTKFGIQNSEGDTFKYHAFGNNYGIAGYTNEKGKFVAKVITMAERYNGFKLDDKPDIFLKINDMVKVEINGKQEVYRIQKMDLRGGITLKLHNISGADKNESSINEKSLKTLINDYKLEKIRIDALGKIA

SEQ ID NO: 9424 - protein, 832 aa, synthetic construct
  REGION 1..832: note = Synthetic
MSKQLVMGLDVGTNSLGWALVRFDEGEETSKQIVAAGVRIFPRGVEDKTPTPKNQKRRERRLARRVIQRRARRKQRMVRLLVEHNLLPLEILTGQNVEGTLNNLGDPYLLRAKALDHPLNSHELGRVLLHLVQRRGFLSNKKTLLGRDMLDDPDVLAELAETEESEAGTSNSEETAFKAEINSLRNSISEEGYRSLGEFLASKGPHECKRNRDGQFIRTDRKMYHDEFTLIVEAQRSHHTALTDKFIETLEQTIFHQRPIKLKEGRVGKCTLEPNSQRIAIARLEYQRFRYLCDINNLRYFEAQKDTEVGLSSDQRELLVELFEAKSDVTFPAIRKALGLDKTADFNLDSGVKKLKGNRTSVVIRSCFPKWDNLSEEEKHNLVDDLLSFQKKSALKRRLISFWKCSPQEAVKLCMVELESGRGSLSRKAIVKLLPYLREGHELSQARKSAGYSYEMQKGERSILATPPDIPNPIVSRSLNEVRRLVNAVVKEHGKPTVIRVEMARDLEMNTKRYKAFVAQQSANTKENEKATEEFKKTTGQAFAKKNDKLKYRLWKDQRFVSAYSNRQISLAQLFSAEVEIDHVIPYSVSLDDSYQNKVVCFAGENREKGQRTPIDAFLPDASRWEQITQLISKWGKHLSSKRSRFFQTADSLSDRDFIASQLNDTRYIAKETGQYLKTLGVGVTFTKGVMTSILRRSWDLNTLISESDFKNRRDHRHHAIDAIVTACIDQNLYRSIVFQAKNIENSPHALKLEDLHFDPPMSDIREQTESLLNEMIVSHASSRKLSGALHEETAVGYVSGVGTVYRKRLSPTFKVGDAAKIYDRTVREIVE

SEQ ID NO: 9425 - protein, 988 aa, synthetic construct
  REGION 1..988: note = Synthetic
DEGEETSKQIVAAGVRIFPRGVEDKTPTPKNQKRRERRLARRVIQRRARRKQRMVRLLVEHNLLPLEILTGQNVEGTLNNLGDPYLLRAKALDHPLNSHELGRVLLHLVQRRGFLSNKKTLLGRDMLDDPDVLAELAETEESEAGTSNSEETAFKAEINSLRNSISEEGYRSLGEFLASKGPHECKRNRDGQFIRTDRKMYHDEFTLIVEAQRSHHTALTDKFIETLEQTIFHQRPIKLKEGRVGKCTLEPNSQRIAIARLEYQRFRYLCDINNLRYFEAQKDTEVGLSSDQRELLVELFEAKSDVTFPAIRKALGLDKTADFNLDSGVKKLKGNRTSVVIRSCFPKWDNLSEEEKHNLVDDLLSFQKKSALKRRLISFWKCSPQEAVKLCMVELESGRGSLSRKAIVKLLPYLREGHELSQARKSAGYSYEMQKGERSILATPPDIPNPIVSRSLNEVRRLVNAVVKEHGKPTVIRVEMARDLEMNTKRYKAFVAQQSANTKENEKATEEFKKTTGQAFAKKNDKLKYRLWKDQRFVSAYSNRQISLAQLFSAEVEIDHVIPYSVSLDDSYQNKVVCFAGENREKGQRTPIDAFLPDASRWEQITQLISKWGKHLSSKRSRFFQTADSLSDRDFIASQLNDTRYIAKETGQYLKTLGVGVTFTKGVMTSILRRSWDLNTLISESDFKNRRDHRHHAIDAIVTACIDQNLYRSIVFQAKNIENSPHALKLEDLHFDPPMSDIREQTESLLNEMIVSHASSRKLSGALHEETAVGYVSGVGTVYRKRLSPTFKVGDAAKIYDRTVREIVEDLRKFGGDPKIAFSPDNPVYHRDGKTLIKRVRVQQAKIGFDTLNETKFAVSNSLGIPFKWFAYGNIHSLNVFRNEDGKLRCEVVQMAEAARLKRNKLEASERPHIQIHKNDSVLLTVDGMDCVYRVQKIESPNKLTLKPHNVSGAEKDQTQIRKSVPTLLRDYHLRKVRVNILGDVRDD

SEQ ID NO: 9426 - protein, 1013 aa, synthetic construct
  REGION 1..1013: note = Synthetic
MGKSILGLDLGTNSIGWALLAASHDNIPNSIIDSGVRIFPKAVQDKTPTPKNQERRNNRLARRVIQRRARRKERLKNYLISLNLLPSILKDTPQPEITLNTFGCPYQLRAKALDHVLEPYELGRVILHIGQRRGFQSNKKTLLGRDMLDDPDVMAVLQDEGLIDDSNKEERAFKQEISELRQSINHSGFRTLGEYLASLEHQDCKRNRKGTKLRTDRQMYRDELKMIFNAQANHHCQLTENVQIELANIIFHQRPLKLKSDRIGKCSLEPRKKRAALARLEVQQFRYLQDINHLKYFDPYSEQELWLTQEQKLKLIELFEQKDLVTFPQICKTLGLDNTYKFNLDTGNKKLKGNRTSFAIYSVLPSWNEISLDQKIDFVEDLITINKKSVLKKRLIDHWKCDREIAVKLCMLEFEPGHANNSLKAINKMLPFLRKGRIYSDARVAAGYEYESQTGKVVDRLGPAPEVNNPIVSRGLSEVRRVVNAIIAEYGKPDVIHIEMARDLEMNTKKYAAFAKQQKANTKENDEATKKFQHIASKTVLATKYPNHEMKLRYRLWKAQNEQCAYSGKMIGLEELFTANIEVDHILPYSKSFDDSFMNKVVCTQKENQYKGNRTPKDAYDGSEEKWEQISQRIKKWPQAKQSKFYKTSEELINGEGDFLSSQLNDTRYICKEAGQYLKKLGVDVTYPKGVMTSWLRFQWGLNNLIGTTNEKERIDHRHHTIDAAVIACIDRKLYDTLRKQAKSLEESDRGLSMKDIHIEPPFASIREQLMEQLSKLIVSHTPQHKISGALHKDTGVGFIDGIGTVYRKDLNGDFSLKNAQSIIDPQVKKQVLSHLAKYDNKPKDAFADGEIVTHKDNKTSIKRVRVVQAKNTLASLHKSKLPITDKQGKVFKWYAFGNTHCVYIFKLDNGKYRTEFVTAYQAKTAINTKIDSEVQPMLTLHKNDLVELTVDGEKQLHRIQKLESKANSIQTRLHTAARNNDKSEGIRLSVPVLMNTYQLKLLKVNAIGKLLD

SEQ ID NO: 9427 - protein, 951 aa, synthetic construct
  REGION 1..951: note = Synthetic
MSKQKILGLDLGSNSIGWALLETNEEGVPTTLIDAGCRIFQKAVEDKTPTPKNAKRRERRLARRVLQRRARRKQKMLNYLVSNNLLPAKLKDDPRPEGILNELGDPYILRKKALDDQLTPHELGRVFLHLVQRRGFLSNRKTLLGDMADDPDVLAVLAEIGEEDPNLSANSEETGFKQDITELREKISESGSRTLGEYLATIEAPYCRRNRSREGGHLRTDRLMYKEELDLIFNKQAEFHHVLTAEVNGQLEDIIFYQRPLKLQADRVGKCSLEPSRKRARMATLEYQRFRMLQDINNLEYFDPWADAYTRVKEEDRAKLLKLFEENASVTFPKVRKTLGLDKKVEFNLESGVKKLKGNTTSCAIRSEFDGWDELKSDQQHLLVEDLLTIQKKSALKKRLEFHWGLNHKTAIRLCMTEFEPDHGNLSVKAMNKLLPHMGKGVIYSDARQLAGYSYEKEQVAPADKLGSPPELPNPIVMKGLHELRRVVNAVIAEHGKPDVVRVEMARDLESNTKRYSAYIKQQKANTVANDEAVKKYEEIMQSMGGLQSRYPSRTDKLKYRLWKEQDFRCPYSGKTISQKQIFGPEIEIDHIVPYSQSLDDSYMNKVVCFASENRFKGNRTPYDAFSGSAEKWEHVTQQIARWPFNVRSKKDRFYKRGSDIQERDFIGSQLTDTRYISREAASYIQTLGVDVTFTRGVMTSWIRHMWKLNELLSKTDEKERADHRHHAIDAVVTACIDRRLYGTLVSLARDLERSKSALSMKDLNIDPPWAALRLDLESKLGKMIVSHIPMRKLTGALHEETGVGFKQGIGTVYRKNLDPGFTERHVEAIYDDVVREQVRIHLEKYGGKPKEAFAEGVIVYHRDGKTPIKRTRVRQAKVDLKELSEQKFGVRNKQGETFRWMAYGNLHHVEILRSTKTGKYRGEFVTMMEAAHRARGLAGKKQSMVKTDHG

SEQ ID NO: 9428 - protein, 934 aa, synthetic construct; identical to SEQ ID NO: 4995
  REGION 1..934: note = Synthetic

SEQ ID NO: 9429 - protein, 1040 aa, synthetic construct
  REGION 1..1040: note = Synthetic
MSNTILGIDLGSNSIGWALLSADIKDRPNGLIDAGVRIFPKAVEEKTPTPKNAKRRERRLARRVVQRRARRKQRMLNYLISLKLLPETLKDHPQPEIILNELGDPYQLRAKALDEKLTAYELGRILLHLVQRRGFLSNKKTLLGSEMLDDPDVQQVLVELGDDNPDVAGTDSEETAFKKDISELRDRISSSDCRTLGEYLASLSEEDCKRNRSHNGGHLRTDRKMYRDELHAVWEKQAEYHLILTEDVRFQLEEIIFHQRPLKLKKDRVGKCSLEKSNKRCQIARLEYQRFRYLQDINNLRYIDPYTDAEKSLTEEDRDKLVHLFENKATPTFGAIRKELGLKGIQFNLENSLKKLKGNTTACEIRQVFSGWDNLPDEQQQALVEDLLTIRKKTALKKRLMDHWVIDGKTAVLLCMAEFEPGYGNHSMKAVNKLLPFLKQGMVYSDTRVEAGYGYEQEGIEHVDRLGAPPEIPNPIVSKGLHELRRVVNALIAEYGKPDVIRIEMARDLEMNTKRYKAFRKQQDDNTKANNKATEEYQAVASRNPALELSKYPSKTDKIKYRLWSDQGGRCAYSNKPINMTDLFSANIEIDHILPFSQSLDDSYMNKVVCVAAENRYKGNRTPKDAFAGNGDKWDQITSAIHRWDRKKLKSKIDRFYKTGAELVKRDFIGSQLTDTRYISREAGLYLKTLGVDITYTRGIMTDWLRHHWNLNTLIGEADKKERTDHRHHAIDAVVTACIDRRFYQVLAANAKSLGEKRTGLTMHDLITDSPWPELRTEIADRLETLIISHTSQRKITGALHEETGVGFIDGVGTVYRKNLNSDFTLKNAQSILDPVVKEQVIKHLKAHNNKPKQAFAEGVVVFHKNAKTPIKRVRVMQSDTTREKLEKSKLGVRNKQGNVFRWMTYGNMHHVEIIRHKKSGKYEGIFVTAMEAAHRARGINGLKRPIIQKDHGENVEFVIALHINDTVSLDKDGKQQLYRVKKLGQLNQGRNPRPTLSPVNSADERGIFSDSVKNLMEKNSMKLHRINAIGKLQHDQTNC

SEQ ID NO: 9430 - protein, 1030 aa, synthetic construct
  REGION 1..1030: note = Synthetic
MMSKVVLGLDLGSNSLGWGLLESDDEGVLQRIIDVGVRIFPKAVEEKTPTPKNQERRIKRLARRTIQRRARRKKKMLNYLVSLKLLPQELLGDESFEGILNGLGDPYDLRAKALDYDLKPYEFGRVLLHLVQRRGFLSNKKTLLGRDMLDDPDVLAILGEEGEFEESDAEESAFKQDISSLREEIKSGGYRTLGEFLASREKHEPKRNRDGQHLRTDRQMYREELVMLFSRQRHVFSQLSPEVEDKIEEIIFHQRPLKLRPDRVGKCKLEPSNKRAAVARLEYQRFRYWQDINSLEFFDPYDEVWKRLTEEDREKLAILFENHAVITFARIRKELGLDRKAEFNLDSGVKKLKGNTTACAIREVYSNWDKLDDVKKLLLTEDLLTIKKKSALKKRLVGHWRLDAETAVKLCMVEFEPDYGSHSLKAINKLLPYLQEGVIYSDARVKAGYGYELEEIEIQDKLGQPPELPNPIVNKALHELKRVVNALIKEYGKPDVIRIEMARDLEMNTDRYKRFVSQQKKNTAANDKAVEAYQQISQEHPRLQLSNYPSREMKLRYRLWQDQDCFCIYSNRAISLKDLFSAEVEVDHILPYSQSLDDSYMNKVVCYAKENQNKGNRTPIDAFSSNREKWEQITQALSRWPKHFSSKRDRFFRRADELMRRDFIESQLTDTRYICKEAHKYLKPLGCDITFTRGVMTSWLRHQWELNDLIGETDQKERTDHRHHTIDAVVTACIDRKLYASLIQQSRELEHSGSALSMKELHFTPEISDIKEQLEKALDDLIVSHVPQRKLTGAFHEETGVGFIDGVGTVYRKRLSPDFKVKNVNSIIDDTVRELVKSHLDMNGNDPKSAFSEGFKLYHRDGKTLIKRVRVVQSKATLNSLDKSKFAVKDKNGKPFKWHAYGNTHHVDVFRHKTKPGTYKADFITAMEMARRFRGVRNTPQQKVINFFGDDWEYLMSLHRNDLVEVKVGGVKQLHRIQKLDMVNSKIATRLHTSALINIESEGMEMSVASLINKHDLRLLRVNAIGKLGE

SEQ ID NO: 9431 - protein, 1031 aa, synthetic construct; identical to SEQ ID NO: 4979
  REGION 1..1031: note = Synthetic

SEQ ID NO: 9432 - protein, 666 aa, synthetic construct
  REGION 1..666: note = Synthetic
NSLGWAVFNSNQKLKPIELIDLGVRIFPKAVEDKTPTPKNQQRRNARLARRTIQRRARRKRRLEHYLTKLGFLPIELASTDCREGILNELGDPYMLRARALDQPVTAYELGRIFLHLVQRRGFLSNRKTRLGRDMLDDPDVLAIINELEGDDENDKELTAFKADISLLNQAITESGARTLGEYLSSFSQHACKRNRHDQHLRTDRQMYRNELREIFTKQSYYHASLTEEVQAEIEHIIFHQRPLKLDDDRVGKCSLESRNKRSFIARIEYQRFRYLQDINNLSYFDPYTEKHIRLSVDDREKLAELLDRSAQISFAKVKKLLGLDRRTAFNLDTGVKKLFGNKTAAAIIEVYPDWLSLTESQRHFLVEDLISFEKKAALKRRLIQFWKLDPITAVNLCMVELEPGYGQVSLKAIKKLLPHLQNGLIFSDARIQAGYEYKKQEIEVLKSLKSPPTLSNPIVNKALHELRRVVNALIKRYGKPSSIRIEMARDLEMNTKRYNSFLTQQSRNAKLNDKATEAYRQVWSEHPQLKLSSYPSRDQKIRYRIWEDQGHRCIYSGISINLETLFSAEIEIDHILPYSQSLDDSYMNKVVCFAKENQYKGQRTPVDAFGSDEYKWEQITQSITRWPKSLTGKRDRFYRGASDLLNRDFIGSQLTDTRYICREAG

SEQ ID NO: 9433 - protein, 1031 aa, synthetic construct
  REGION 1..1031: note = Synthetic
MSKTIWGLDLGSNSLGWAVFNSNQKLKPIELIDLGVRIFPKAVEDKTPTPKNQQRRNARLARRTIQRRARRKRRLEHYLTKLGFLPIELASTDCREGILNELGDPYMLRARALDQPVTAYELGRIFLHLVQRRGFLSNRKTRLGRDMLDDPDVLAIINELEGDDENDKELTAFKADISLLNQAITESGARTLGEYLSSFSQHACKRNRHDQHLRTDRQMYRNELREIFTKQSYYHASLTEEVQAEIEHIIFHQRPLKLDDDRVGKCSLESRNKRSFIARIEYQRFRYLQDINNLSYFDPYTEKHIRLSVDDREKLAELLDRSAQISFAKVKKLLGLDRRTAFNLDTGVKKLFGNKTAAAIIEVYPDWLSLTESQRHFLVEDLISFEKKAALKRRLIQFWKLDPITAVNLCMVELEPGYGQVSLKAIKKLLPHLQNGLIFSDARIQAGYEYKKQEIEVLKSLKSPPTLSNPIVNKALHELRRVVNALIKRYGKPSSIRIEMARDLEMNTKRYNSFLTQQSRNAKLNDKATEAYRQVWSEHPQLKLSSYPSRDQKIRYRIWEDQGHRCIYSGISINLETLFSAEIEIDHILPYSQSLDDSYMNKVVCFAKENQYKGQRTPVDAFGSDEYKWEQITQSITRWPKSLTGKRDRFYRGASDLLNRDFIGSQLTDTRYICREAGAYLSTLGVDVSYTRGVMTDWLRHQWMLNDLLGQTDQKERDDHRHHAIDAAVTACIDRSFYQEIVSQAKDIERTRSGLTMKDIYFDSPLTDLKSHLADNLECLVVSHVPQRKISGALHEDTGVGFIEGIGTVYRKRLDNTFGVKRAQRIIDVEVKKLVLNHLSKFDDDPKKAFPVGFSLFHKDKKTLIKRVRVIQSSTDAKKLRKNKLPILDKSGRVFKWFAYGNTHHVEILKKTDQVKAIFITMAEAAARARNNTRSPQTVIQTKFDNDWVFMMALHINDMVKVTINGKEYIHRIQKLNMVNSNLTTRLHTAAKQDDKSQSLEASVGTFIKTYNMRPILVNAIGVIADDKANC

SEQ ID NO: 9434 - protein, 1036 aa, synthetic construct
  REGION 1..1036: note = Synthetic
MSKTILGLDLGSNSIGWALLTADDNGQPWGICDAGVRIFPKAVEEKTPTPKNVKRRTMRLARRTIQRRARRKMKLSNYLISLGLLPKELLESSQPEGILNSLGDPYALREKALDNSLTANELGRVLLHLVQRRGFLSNRKTLLGRDMLDDPDVLAVLGEHDESEDDAAEESAFKADISQLRESIREAGCRTLGEYLANKPKGACKRNRDGQHLRTDRQMYQEELSLILEQQSQHHPLLTSDVQEKIERIIFYQRPLKLKPDRVGKCSLEPKNKRAAIARLEYQRFRYLQDINNLSYLDPYTDEFHSLTQEDRQKLASLFEISDSLSFPAIRKALGLDKKVEFNLDSGVKKLRGNTTVATIRSEFSEWDSLSPGEHQMLVEDLLTIKKKSALKQRLMTRWKMDGGTAVRLCLQEFEPGYGSVSLKAIRRLLPHLEQGLIYSDARQAAGYSYDPEVMGVQVQEKLGPPPMLPNPIVSKALHELRRVMNALINEHGKPDIVRIEMARDLEMNTKRYNSFRKQQDKNTKSNDRATEAYQQIGKERPTLKLKVYPSREQKIRYRLWEDQGHCCAYSGRTINLGALFSGEVEVDHILPYSLSLDDSYMNKVVCFANENQRKGQRTPIDAFGLDEEKWNQITQAISRWGRELSSKRNRFYRREVELLERDFIGSQLTDTRYIAKEAGTYVKTLGVDVTFSRGIMTGWLRHQWQLNDLIGSSSEKERTDHRHHTIDALVTACIDRPLYNALVRQSKDLEKSGSGRTMKEIYLTPPILDIRQQLAEKLESLIVSHVPQRKITGALHEETGVGFIEGVGTVYRQRLDQEFNAKKVASIVDDGVRELVIAHLDKYGNDAKKAFSEGVQLLHKDGKTSIKRVRVVQSKTTREKLEKSKFAIRKADGVAFKWHAYGNTHHVEILRRRDGKGETASFFVTAMEAARRAREGVGKSASLVKIEHGDQWEFLMALHINDLVKVLVEGEQQVHRVQKLEMDASRITLRLHTAATIGGKSEGIRKSISTLINDYQMQPITVNAIGKYHHDQAHD

SEQ ID NO: 9435 - protein, 1036 aa, synthetic construct
  REGION 1..1036: note = Synthetic
MSKTILGLDLGSNSIGWALLTADDNGQPWGICDAGVRIFPKAVEEKTPTPKNVKRRTMRLARRTIQRRARRKMKLSNYLISLGLLPKELLESSQPEGILNSLGDPYALREKALDNSLTANELGRVLLHLVQRRGFLSNRKTLLGRDMLDDPDVLAVLGEHDESEDDAAEESAFKADISQLRESIREAGCRTLGEYLANKPKGACKRNRDGQHLRTDRQMYQEELSLILEQQSQHHPLLTSDVQEKIERIIFYQRPLKLKPDRVGKCSLEPKNKRAAIARLEYQRFRYLQDINNLSYLDPYTDEFHSLTQEDRQKLASLFEISDSLSFPAIRKALGLDKKVEFNLDSGVKKLRGNTTVATIRSEFSEWDSLSPGEHQMLVEDLLTIKKKSALKQRLMTRWKMDGGTAVRLCLQEFEPGYGSVSLKAIRRLLPHLEQGLIYSDARQAAGYSYDPEVMGVQVQEKLGPPPMLPNPIVSKALHELRRVMNALINEHGKPDIVRIEMARDLEMNTKRYNSFRKQQDKNTKSNDRATEAYQQIGKERPTLKLKVYPSREQKIRYRLWEDQGHCCAYSGRTINLGALFSGEVEVDHILPYSLSLDDSYMNKVVCFANENQRKGQRTPIDAFGLDEEKWNQITQAISRWGRELSSKRNRFYRREVELLERDFIGSQLTDTRYIAKEAGTYVKTLGVDVTFSRGIMTGWLRHQWQLNDLIGSSSEKERTDHRHHTIDALVTACIDRPLYNALVRQSKDLEKSGSGRTMKEIYLTPPILDIRQQLAEKLESLIVSHVPQRKITGALHEETGVGFIEGVGTVYRQRLDQEFNAKKVASIVDDGVRELVIAHLDKYGNDAKKAFSEGVQLLHKDGKTSIKRVRVVQSKTTREKLEKSKFAIRKADGVAFKWHAYGNTHHVEILRRRDGKGETASFFVTAMEAARRAREGVGKSASLVKIEHGDQWEFLMALHINDLVKVLVEGEQQVHRVQKLERDASSITLRLHTAATIGGKSEGIRKSISTLINDYQMQPITVNAIGKYHHDQAHD

SEQ ID NO: 9436 - protein, 1036 aa, synthetic construct
  REGION 1..1036: note = Synthetic
MSKTILGLDLGSNSIGWALLTADDNGQPWGICDAGVRIFPKAVEEKTPTPKNVKRRTMRLARRTIQRRARRKMKLSNYLISLGLLPKELLESSQPEGILNSLGDPYALREKALDNSLTANELGRVLLHLVQRRGFLSNRKTLLGRDMLDDPDVLAVLGEHDESEDDAAEESAFKADISQLRESIREAGCRTLGEYLANKPKGACKRNRDGQHLRTDRQMYQEELSLILEQQSQHHPLLTSDVQEKIERIIFYQRPLKLKPDRVGKCSLEPKNKRAAIARLEYQRFRYLQDINNLSYLDPYTDEFHSLTQEDRQKLASLFEISDSLSFPAIRKALGLDKKVEFNLDSGVKKLRGNTTVATIRSEFSEWDSLSPGEHQMLVEDLLTIKKKSALKQRLMTRWKMDGGTAVRLCLQEFEPGYGSVSLKAIRRLLPHLEQGLIYSDARQAAGYSYDPEVMGVQVQEKLGPPPMLPNPIVSKALHELRRVMNALINEHGKPDIVRIEMARDLEMNTKRYNSFRKQQDKNTKSNDRATEAYQQIGKERPTLKLKVYPSREQKIRYRLWEDQGHCCAYSGRTINLGALFSGEVEVDHILPYSLSLDDSYMNKVVCFANENQRKGQRTPIDAFGLDEEKWNQITQAISRWGRELSSKRNRFYRREVELLERDFIGSQLTDTRYIAKEAGTYVKTLGVDVTFSRGIMTGWLRHQWQLNDLIGSSSEKERTDHRHHTIDALVTACIDRPLYNALVRQSKDLEKSGSGRTMKEIYLTPPILDIRQQLAEKLESLIVSHVPQRKITGALHEETGVGFIEGVGTVYRQRLDQEFNAKKVASIVDDGVRELVIAHLDKYGNDAKKAFSEGVQLLHKDGKTLIKRVRVVQSKTTREKLEKSKFAIRKADGVAFKWHAYGNTHHVEILRRRDGKGETASFFVTAMEAARRAREGVGKSASLVKIEHGDQWEFLMALHINDLVKVLVEGEQQVHRVQKLERDASSITLRLHTAATIGGKSEGIRKSISTLINDYQMQPITVNAIGKYHHDQAHD

SEQ ID NO: 9437 - protein, 1026 aa, synthetic construct
  REGION 1..1026: note = Synthetic
MSKAILGIDLGSNSLGWALLSADDDGKPTDIIDTGVRIFPKAVEEKTPTPKNVKRRTSRLARRTIQRRARRKKKLMNYLVSLSLLPKTLLTDLQPEGILNSLGDPYLLRKKALDQDLSSHELGRVLLHLVQRRGFLSNKKTLLGRDMLDDPDVLAVLGEDDLDESDGAEETAFKADISLLRAEIRENGCRTLGEYLAKRPLHECKRNRLDEHIRTDRQMYLEELSLIFERQTKCHKALTEEVRGHIEHIIFYQRPLNLNKDRVGKCSLEPSKKRAAMARLEYQRFRYLQDVNNLSYFDPNTEEQIKLTEADKQKLYAFFETKESPTFPQIRKLIGLDKSCEMNLETQVKKMRGNTTAVKIQKCYTGWSDLSADKQEMFVEDLISIKKKSALKQRLMSYWKMTGVEAVQVCLLELEPGYGSLSLKALRKLLPHLEAGLIYSDARQAAGYGYEVEEVEAQDTLGLPPEIPNPIVSKGLGELRRVVNALIAEYGKPDVIRIEMARDLEMNTKRYKSFMAQQSKNTKSNDKASDAYKKIAQEHPKLQLSSYPSREQKIRYRLWLDQSHMCPYSCKQISLSALFSADIEVDHILPYSQSLNDSYMNKVVCFAKENQIKGQKTPKDAFGASTDKWEQITQAISRWPRELSSKRDAFYRTEGELLERDFIGNQLTDTRYISKEAGTYLKSLGSDVTFTRGAMTSWLRHQWKFNDLLGTTAEKERTDHRHHAIDAVVTACIDLSLYRSLVAQSNDLERSKSKLTMKDLYVTPPIIEFKDKLAQKLDSLIVSHVPQRKIAGALHEETGVGFIEGIGTVYRQRLDSDFDAKKADKIIDVTVRAIVLGQLNKHGGDPKKAFGDNNKVYHSDGKTLIKRVRVVQSKTTLKKLEENKFATRDRNGKAFKWHAYGNTHHVEILKNIKTGKYKGDFVTVAEAALRCRSKNTPIINKDHGEEWEYQMSLHVNDLVQLTVADDTEIYRIQKLNMVNAIVSLRLHTAATIRISAEGIEKSAGTLVKDYKMAPVLINSIGKLMND

SEQ ID NO: 9438 - protein, 698 aa, synthetic construct
  REGION 1..698: note = Synthetic
MSKAILGIDLGSNSLGWALLSADDDGKPTDIIDTGVRIFPKAVEEKTPTPKNVKRRTSRLARRTIQRRARRKKKLMNYLVSLSLLPKTLLTDLQPEGILNSLGDPYLLRKKALDQDLSSHELGRVLLHLVQRRGFLSNKKTLLGRDMLDDPDVLAVLGEDDLDESDGAEETAFKADISLLRAEIRENGCRTLGEYLAKRPLHECKRNRLDEHIRTDRQMYLEELSLIFERQTKCHKALTEEVRGHIEHIIFYQRPLNLNKDRVGKCSLEPSKKRAAMGRLEYQRFRYLQDVNNLSYFDPNTEEQIKLTEADKEKLYAFFETKESPTFPQIRKLIGLDKSCEMNLETQVKKMRGNTTAVKIQKCYTGWSDLSADKQEMFVEDLISIKKKSALKQRLMSYWKMTGVEAVQVCLLELEPGYGSLSLKALRKLLPHLEAGLIYSDSRQAAGYGYEVEEVEAQDTLGLPPEIPNPIVSKGLGELRRVVNALIAEYGKPDVIRIEMARDLEMNTKRYKSFMAQQSKNTKSNDKASDAYKKIAQEHPKLQLSSYPSREQKIRYRLWLDQSHMCPYSCKQISLSALFSADIEVDHILPYSQSLNDSYMNKVVCFAKENQIKGQKTPKDAFGASTDKWEQITQAISRWPRELSSKRDAFYRTEGELLERDFIGNQLTDTRYISKEAGTYLKSLGSDVTFTRGAMTSW

SEQ ID NO: 9439 - protein, 1026 aa, synthetic construct
  REGION 1..1026: note = Synthetic
MSKTILGIDLGSNSLGWALLSADDDGKPTDIIDTGVRIFPKAVEEKTPTPKNVKRRTSRLARRTIQRRARRKKKLMNYLVSLSLLPKTLLTDLQPEGILNSLGDPYLLRKKALDQDLSSHELGRVLLHLVQRRGFLSNKKTLLGRDMLDDPDVLAVLGEDDLDESDGAEETAFKADISLLRAEIRENGCRTLGEYLAKRPLHECKRNRLDEHIRTDRQMYLEELSLIFERQTKCHKALTEEVRGHIEHIIFYQRPLNLNKDRVGKCSLEPSKKRAAMARLEYQRFRYLQDVNNLSYFDPNTEEQIKLTEADKQKLYAFFETKESPTFPQIRKLIGLDKSCEMNLETQVKKMRGNTTAVKIQKCYTGWSDLSADKQEMFVEDLISIKKKSALKQRLMSYWKMTGVEAVQVCLLELEPGYGSLSLKALRKLLPHLEAGLIYSDSRQAAGYGYEVEEVEAQDTLGLPPEIPNPIVSKGLGELRRVVNALIAEYGKPDVIRIEMARDLEMNTKRYKSFMAQQSKNTKSNDKASDAYKKIAQEHPKLQLSSYPSREQKIRYRLWLDQSHMCPYSCKQISLSALFSADIEVDHILPYSQSLNDSYMNKVVCFAKENQIKGQKTPKDAFGASTDKWEQITQAISRWPRELSSKRDAFYRTEGELLERDFIGNQLTDTRYISKEAGTYLKSLGSDVTFTRGAMTSWLRHQWEFNDLLGITAEKERTDHRHHAIDAVVTACIDLSLYRSLVAQSNDLERSKSNLTMKDLYVTPPIIEFKDKLAQKLDSLIVSHVPQRKIAGALHEETGVGFIEGIGTVYRQRLDSDFDAKKADKIIDVTVRAIVLGQLNKHGGDPKKAFGDNNKVYHSDGKTLIKRVRVVQSKTTLKKLEENKFATRDRNGKAFKWHAYGNTHHVEILKNIKTGKYKGDFVTVAEAALRCRSKNTPIINKDHGEEWEYQMSLHVNDLVQLTVADDTEIYRIQKLNMVNAIVSLRLHTAATIRISAEGIEKSAGTLVKDYKMAPVLINSIGKLMND

SEQ ID NO: 9440 - protein, 781 aa, synthetic construct
  REGION 1..781: note = Synthetic
MSKTILGLDIGSNSLGWSLLSADEAGQPTDIIDVGVRIFQKSVLDKTPTPKNQKRREKRLARRTLQRRARRKLKLLNYLIRLNLLPAELSGNLQPEGILNGIGDPYELRAKALDKDLTAYELGRVLLHLVQRRGFLSNKKTLLGRDMLDDPDVISVLGDDDADLADDAEETAFKTDISLLRAEINKIEPADHRTLGKYLASLPKHECKRNRDGNHIRTDRQMYLDELSLIFERQLACHPVLTEDVQMEVKEIIFFQRPLKLKDDRVGKCSLEPNKKRSAISRLEYQRFRYLQDINNLAYFCPNTDQWVKLNDQDKEKLKGVFETSNSVSFARVKKELGLQRNIKLNLDAGVKHLKGNTTVFSITKVYSDWHSLDAPQQQAFVEDLISIKKKSALKTRLVSHWGLNGEDAVRVCMVELEPGHGSVSLKAINLLLPHLEAGMIYSDARVAAGYGYEKQAIDVQSKLGMPPELPNPIVMKGLHELRRVVNALIAEHGKPDIIRIEMARDLEMNTKRYKAQEARQKLNTKLNDEAKEAYQNIGIEHPKLQLSKYPSRDQKIKYRLWKDQNMCCAYNGKTISLGKLFSADIEIDHILPYSHSLDDSYMNKVVCFAKENQVKGQRTPKDAFGSDEEKWGQITQALQRLPQQLSRKRDAFYKVSADLSDHDFVGSQLTDTRYMSKVAGTYLESLGSDITFTRGIMTSWLRYQWDFNSLISATDNKERGDHRHHAIDAAVTACIDRKLYQTLVEVSHDLERSHSSLSMRDVYIDPTIKDFKEKLETKLD

SEQ ID NO: 9441 - protein, 1040 aa, synthetic construct
  REGION 1..1040: note = Synthetic
MSKTILGLDLGSNSLGWSLLSADDAGQPTDIIDIGVRIFQKSVQEKPPTPKNQQRRTKRLARRTIQRRARRKLKLLNYLIRLNLLPTELSGNLQPEGILNGIGDPYQLRAKAPDEDLTAYELGRVLLHLVQRRGFLSNKKTLLGRDMLDDPDVISVLGDDTDSTDSAEETAFKADISLLRAEINKLEPPDSEQESPDSEHKKTLGKYLASLPKHECKRNRDGNHIRTDRQMYLDELSLIFEKQSVCHPVLTEDVQMAIKEIIFFQRPLKLKDDRIGKCSLEPNKKRSAISRLEYQRFRYLQDINNLTYFCPNTEQWVKLNNQDKEKLRVLFEVSKELTFARIKKELALKRNIKLNLETRDKPLKGNTTVFSISEVYSDWHTLDALQQRAFVEDLISIKKKSALKRRLVSHWGLNGEDAVRVCMVELEPGYGSVSLKAINKLLPHLEAGLIYSDARVAAGYGYEKEEIEIESKLGMPPELPNPIVMKGLHELRRVVNALIAEHGKPDIIRIEMARDLEMNTKRYKAHEARQKLNTKLNDEAQKAYQNVGIEHPKLQLSKYPSRDQKIKYRLWKDQNMCCAYSAKTVSLGKLFSADIEIDHILPYSHSLDDSYMNKVVCYAKENQVKGQRTPMDAFGANEEKWEQITQAIQRLPKQLSKKRDAFYKTSADLSDHDFIGSQLTDTRYMSKVAGTYLESLGSDITFTRGIMTSWLRYQWDFNSLISATDNKERGDHRHHAIDAVVTACIDRNLYQTLVEVSRSLESSQSSLSMRDVYIDPTINDFKDKLKTKLDQMIVAHAPNRKLTGALHEEKGVGFIEGIGTVNRKRLNEDFELKHAKNIIDDNVREIVTTHLEKHNGKPKLAFAPGFKLYNTGGEILIKRVRVVQATTSLEKLENTKLAIKDKAGKVFKWHAYGNNHHVEILKNRGNNKYKSEFVTTFEASQRARTPQGNGTQIIQQNHGDEWEFLMALHKNDLVRLTVDGQKKIYRVQVLEGAGKIIIRDHRAATLNNPQKMLRKSISTLLETYEMTPIKINAIGKLLDD

SEQ ID NO: 9442 - protein, 865 aa, synthetic construct
  REGION 1..865: note = Synthetic
DAEETAFKADISLLRAEINNIKKPEHRTLGKYLASLPKHECKRNRDGNHIRTDRQMYLDELSLIFERQSVCHPVLTEDVQMEVKEIIFFQRPLKLKEDRVGKCSLEPNKKRSAISRLEYQRFRYLQDINNLAYFCPNTDQWVKLNDQDKEKLRGVFEVSEKLTFARVKKELAPKRNIKLNLETGVKHLKGNTTVFSISNAYSDWHTLDATQQEAFVEDLISIKKKSALKRRLVSHWGLNGEDAVRVCMLELEPGYGSVSLKALNKLLPHLEAGMIYSDARVAAGYDYEKEEIEIESKLGMPPELPNPIVMKGLHELRRVVNALIAEHGKPDIIRIEMARDLEMNTKRYKAQEARQELNTKLNDEAKEAYQNIGIEHPKLQLSKYPSRDQKIKYRLWKDQNMCCAYSGKTISLGKLFSADIEIDHILPYSRSLDDSYMNKVVCYAKENQVKGQRTPKDAFGANEEKWEQIKQAIQRLPKQLSKKCDAFYKTSADLSDHDFIGSQLTDTRYISKVAGIYLQSLGCDITFTRGIMTSWLRYQWGFNSLISTTGNKERVDHRHHAIDAVVTACIDRKLYQTLVEVSRDLERSQSSLSMRDVYIDPTINDFKDKLEAKLDQMIVAHAPNRKITDALHEETGVGFIEGIGTVYRKRLNETFELKHAKNIIDDNVREIVTRHLEMNNGKAKLAFAPGFKLYHKDGKTLIKRVRVVQANISLEKLEKTKLAIRDKAGKAFKWHAYGNNHHVEILKHRGNNKYKSQFITTFEASQRARTPQGNGTQIIQQDHGDEWELLMALHKNDLVHLTVDGQKKIYRVQKLESPGGLKLRDHRASTLNNPQEEVRMAITTLLASYQMTPIKINAVGKLLDD

SEQ ID NO: 9443 - protein, 724 aa, synthetic construct
  REGION 1..724: note = Synthetic
DAEETAFKADISLLRAEINNIKKPEHRTLGKYLASLPKHECKRNRDGNHIRTDRQMYLDELSLIFERQSVCHPVLTEDVQMEVKEIIFFQRPLKLKEDRVGKCSLEPNKKRSAISRLEYQRFRYLQDINNLAYFCPNTDQWVKLNDQDKEKLRGVFEVSEKLTFARVKKELAPKRNIKLNLETGVKHLKGNTTVFSISNAYSDWHTLDATQQEAFVEDLISIKKKSALKRRLVSHWGLNGEDAVRVCMLELEPGYGSVSLKALNKLLPHLEAGMIYSDARVAAGYDYEKEEIEIESKLGMPPELPNPIVMKGLHELRRVVNALIAEHGKPDIIRIEMARDLEMNTKRYKAQEARQELNTKLNDEAKEAYQNIGIEHPKLQLSKYPSRDQKIKYRLWKDQNMCCAYSGKTISLGKLFSADIEIDHILPYSRSLDDSYMNKVVCYAKENQVKGQRTPKDAFGANEEKWEQIKQAIQRLPKQLSKKCDAFYKTSADLSDHDFIGSQLTDTRYISKVAGIYLQSLGCDITFTRGIMTSWLRYQWGFNSLISTTGNKERVDHRHHAIDAVVTACIDRKLYQTLVEVSRDLERSQSSLSMRDVYIDPTINDFKDKLEAKLDQMIVAHAPNRKITDALHEETGVGFIEGIGTVYRKRLNETFELKHAKNIIDDNVREIVTRHLDKHNGKPKLAFAPGFKLYHKDGNTLIKRVRVVQATTSLEKLEKTKLAI

SEQ ID NO: 9444 - protein, 1028 aa, synthetic construct
  REGION 1..1028: note = Synthetic
MSKIILGLDLGSNSLGWALLSANVATSGKIKPTDIIDMGVRIFPKAVEEKTPTPKSQKRRNSRLARRVIQRRSRRKQKLLNYLIRINLLPLELKGHLQPEIILNSLGDPYQLRAKALDKGLTAHELGRVLLHLVQRRGFLSNKKTLLGQDMLDDPDLLAVLGEEEEFDDKGEEGEFKKEISALRLEIKNAGFRTLGEYLASKTKDECKRNRDGQHLRTDRQMYLEELVLICKRQASCHKVLTEEVQADIEDIIFFQRPLKLKKGRVGKCSLELKNKRAAIARLEYQQFRYLQDINNIEHFDANTEQWIKLTQEDKQTLKQLFKTSEKVTFPALRKALGLQRGTEINLDSGVKSLKGNITATAIREVLPQWDSYSDQQQQALIEDLLSIKKKTALKRRLMSRWQLTGKQALHLCLLEFEPGHGSHSLKAIKNLLPHLEKGLIYSEAIKFSGYDEVKEIALQNKLAMPPELPNPIVNKGLHELRRVVNGLIATYGKPDIIRIEMARDLEMNTENYANFIRQQRINTKLNERATEAFRGVQTGISASKYPNRDQKIKYRLWLDQNHCCAYSGKTISLKALFSADIEIDHILPYSLSLDNSYINKVVCFAKENQLKGQKTPKSAFGSNEAKWNQITQAINKWPKQLENKKKRFYILTSELRERDFITTQLNDTRYMSREAGQYLNTVCSDITFSKGVVTSWLRSQWKLNSLIGTSARKDRDDHRHHAIDAAVTACIDLGLYQRLVATAKSLEESGSALNMYQIAVKSPLPDIRNKLAEKLANIIIAHTPLRKLTGAIHEETGVGFIEGIGNVYRRRLDPQFDLKAAAKIIDPIVKGRVIAHLEKYNGKAKDAFSPEVKLLHLDNKTLIKRVRIVQSKTTRERLEKNKFAIKDKAGKPFKWHAYGNIHHVEILHNKTTQKYRGEFITMQQATARARGILRAKVPIIQTDHGDQWEYLMALHINDLVELNHEQTTKIYRVQKLDRGTARIVLRLHTASTLNNSEESISGAIKVLCETYKMKSIKVNAIGRRLND

SEQ ID NO: 9445 - protein, 1028 aa, synthetic construct
  REGION 1..1028: note = Synthetic
MSKIILGLDLGSNSLGWALLSANVATSGKIKPTDIIDMGVRIFPKAVEEKTPTPKSQKRRNSRLARRVIQRRSRRKQKLLNYLIRINLLPLELKGHLQPEIILNSLGDPYQLRAKALDKGLTAHELGRVLLHLVQRRGFLSNKKTLLGQDMLDDPDLLAVLGEEEEFDDKGEEGEFKKEISALRLEIKNAGFRTLGEYLASKTKDECKRNRDGQHLRTDRQMYLEELVLICKRQASCHKELTEEVQADIEDIIFFQRPLKLKKGRVGKCSLELKNKRAAIARLEYQQFRYLQDINNIEHFDANTEQWIKLTQEDKQTLKQLFETSEKVTFPALRKALGLQRGTEINLDSGVKSLKGNITATAIREVLPQWDSYSDQQQQALIEDLLSIKKKTALKRRLMSRWQLTGKQALHLCLLEFEPGHGSHSLKAIKNLLPHLEKGLIYSEAIKFSGYDEVKEIALQNKLAMPPELPNPIVNKGLHELRRVVNGLIATYGKPDIIRIEMARDLEMNTENYANFIRQQRMNTTLNERATEAFRGVQTGISASKYPNRDQKIKYRLWLDQNHCCAYSGKTICLKALFSADIEIDHIFPYSLSLDNSYINKVVCFAKENQLKGQKTPKSAFGSNEAKWNQITQAINKWPKQLENKKKRFYILTSELRERDFITTQLNDTRYMSREAGQYLNTVCSDITFSKGVVTSWLRSQWKLNSLIGTSARKDRDDHRHHAIDAAVTACIDLGLYQRLVATAKSLEESGSALNMYQIAVKSPLPDIRNKLAEKLANIIIAHTPLRKLTGAIHEETGVGFIEGIGNVYRRRLDPQFDLKAAAKIIDPIVKGRVIAHLEKYNGKAKDAFSPEVKLLHLDNKTLIKRVRIVQSKTTRERLEKNKFAIKDKAGKPFKWHAYGNIHHVEILHNKTTQKYRGEFITMQQATARARGILRAKVPIIQTDHGDQWEYLMALHINDLVELNHEQTTKIYRVQKLDRGTARIVLRLHTASTLNNSEESISGAIKVLCETYKMKSIKVNAIGRRLND

SEQ ID NO: 9446 - protein, 816 aa, synthetic construct
  REGION 1..816: note = Synthetic
MSKIFALDNGSNSIGWAVISADDKFQPIDIIDLGVRIFQKGVEDKTPTPKNQKRRAARLARRTIQRRARRKQKLLNFLMKNNLLPRELDGHLQPEGILNGLGDPYKLRAKALDHDLLPHELGRVLLHFVQRRGFLSNKKTLLGRDMLDDPDVLSVLDDDSDGGADTSEETAFMADISLLRAEIAEGGFRTLGEYLSSKPSHECKRNRHEEHIRTDRRMYMDELALIFDRQSQCHLVLTAKIQSEIAHIIFHQRPIKLRKDRVGKCSLETNKKRAAVARLEYQRFRYLQDINNLAYFDHQTDKWVKINSADKDKLKVLFENSEKVTFPALKKVLGLQRSTEINLDSGVKHLKGNTTASSIRKVYPQWDDLCIEDQMLLVEDLISIKKKSALKQRLKSHWNLAGEEAVMLCLIELEPEYGNVSLKAIHKLLPHLNGGLIYSDARVAAGYGYEVKEIVVQDKLGLPPEIPNPIVQKGLHELRRVVNALIAEHGKPDVIRIEMARDLEMNTKKYKNFIAQQRKNTDLNDKAAKAFRGENTAITASKYPSRDQKIKYRLWADQNQLCAYSGKTINLATLFSAEIEIDHILPYSLTLDDSYINKVVCFAKENQNKGQRTPKDAFGANEEKWNQITQALNRIPRELSKKRDAFYKTESDLLETDFTGSQLTDTRYMSKVAGDYLKTLGCDITFTRGIMTSWLRKQWGFNDLLGDSKEKERSDHRHHAIDAVVTACIDRPLYNALAKTAKELERTYSHLSMNDVYVEPTIANFKSKLSDKLDSMIVSFVPSKKITGALHEDTGVGFIDGIGTVFRARLDEKFDG

SEQ ID NO: 9447 - protein, 1029 aa, synthetic construct
  REGION 1..1029: note = Synthetic
MSKIFALDNGSNSIGWAVISADDKFQPIDIIDLGVRIFQKGVEDPRPTPKNQKRRAARLARRTIQRRARRKQKLLNFLMKNNLLPRELDGHLQPEGILNGLGDPYKLRAKALDHDLLPHELGRVLLHFVQRRGFLSNKKTLLGRDMLDDPDVLSVLDDDSDGGADTSEETAFMADISLLRAEIAEGGFRTLGEYLSSKPSHECKRNRHEEHIRTDRRMYMDELALIFERQSQSHPVLTAKIQSEIAHIIFHQRPIKLRKDRVGKCSLETNKKRAAIARLEYQRFRYLQDINNLAYFDHQTDKWVKINSADKDKLKLLFENSEKVTFPALKKVLGLQRSAEINLDSGVKHLKGNTTASSIRKVYPQWDDLCIEDQILLVEDLISIKKKSALKQRLKSHWNLAGEEAVMLCLIELEPEYGNVSLKAIHKLLPHLNGGLIYSDARVAAGYGYEVKEIVVQDKLGLPPEIPNPIVQKGLHELRRVVNALIAEHGKPDVIRIEMARDLEMNTKKYNNFIAQQRKNTNLNDKAAKAFRGENTAITASKYPSRDQKIKYRLWADQNQLCAYSGKTINLATLFSAEIEIDHILPYSLTLDDSYINKVVCFAKENQNKGQRTPKDAFGANEEKWNQITQALNRIPRELSKKRDAFYKTESDLLETDFTGSQLTDTRYMSKVAGDYLKTLGCDITFTRGIMTSWLRKQWGFNDLLGDSKEKERSDHRHHAIDAVVTACIDRPLYNALAKTAKELERTYSHLSMNDVYVEPTIANFKSKLSDKLDSMIVSFVPSKKITGALHEDTGVGFIDGIGTVFRARLDEKFDLKKAEKIIDPVVKGLVIGHLEKHNGNAKLAFATGFRLCHTDNKTLIKRVRVIQSKTTREELDQNKFSVIDRAGKPFKWHAYGNIHHVAIFQHKTNNKYKSEFVTAADAARRARGIRGAKQPIIQKNGDNDWDFRFALHKNELVTVEYGGEERIFRVEGLERDVSGLSLRCQMAATKKDNSQKIRKSISTLMTGYKMQPIYVNAIGNRVNDKAHH

SEQ ID NO: 9448 - protein, 951 aa, synthetic construct
  REGION 1..951: note = Synthetic
MKNNLLPRELDGHLQPEGILNGLGDPYKLRAKALDYDLLPHELGRVLLHFVQRRGFLSNKKTLLGRDMLDDPDVLSVLDDDSDGGADTSEETAFMADISLLRAEIAEGGFRTLGEYLSSKPSHECKRNRHEEHIRTDRRMYMDELALIFDRQSQCHQVLTAKIQSEIAHIIFHQRPIKLRKDRVGKCSLETNKKRAAIARLEYQRFRYLQDINNLAYFDHQTDKWVKINSADKDKLKLLFENSEKVTFPALKKVLGLQRSAEINLDSGVKHLKGNTTASSIRKVYPQWDDLCIEDQMLLVEDLISIKKKSALKQRLKSHWNLAGEEAVMLCLLELEPEYGNVSLKAIHKLLPHLNGGLIYSDARVAAGYGYEVKEIVVQDKLGLPPEIPNPIVQKGLHELRRVVNALIAEHGKPDVIRIEMARDLEMNTKKYKNFIAQQRKNTDLNDKAAKAFRGENTAIAASKYPSRDQKIKYRLWADQNQLCAYSGKTINLATLFSAEIEIDHILPYSLTLDDSYINKVVCFAKENQNKGQRTPKDAFGANEEKWNQITQALNRIPRELSKKRDAFYKTESDLLETDFTGSQLTDTRYMSKVAGDYLKTLGCDITFTRGIMTSWLRKQWGFNDLLGDSKEKERSDHRHHAIDAVVTACIDRPLYNALAKTAKELERTYSHLSMNDVYVEPTIANFKSKLSDKLDSMIVSFVPSKKITGALHEDTGVGFIDGIGTVFRARLDEKFDLKKAEKIIDPVVKGLVIRHLEKHNGNAKLAFATGFRLCHTDNKTLIKRVRVIQSKTTREELDQNKFSVIDRAGKPFKWHAYGNIHHVAIFQHKTNNKYKSEFVTAADAARRARGIGGAKQPIIQKNGDNDWDFRFALHKNELVTVEYGGEERIFRVEGLERDVSVLSLRCQMAATKKDDSQKIRKSISTLMTGYKMQPIYVNAIGNRVNDKAHH

SEQ ID NO: 9449 - protein, 884 aa, synthetic construct
  REGION 1..884: note = Synthetic
MLDDPDVLSVLDDDSDGGADTSEETAFMADISLLRAEIAEGGFRTLGEYLSSKPSHECKRNRHEEHIRTDRRMYMDELALIFDRQSQCHSILNAKIQSEIANIIFHQRPIKLRKDRVGKCSLEINKKRVAIARLEYQRFRYLQDINNLAYFDHQTDKWVKINSADKDKLKILFENSEKVTFPALKKVLGLQRSTEINLDSGVKHLKGNTTASSIRKVYPQWDDLCIEDQMLLVEDLISIKKKSALKQRLKSHWNLAGEEAVMLCLLELEPEYGNVSLKAIHKLLPHLNSGLIYSDARVAAGYGYEVKEIVVQDKLGLPPEIPNPIVQKGLHELRRVVNALIAEHGKPDVIRIEMARDLEMNTKKYKNFIAQQRKNTDLNDKAAKAFRGENTAITASKYPSRDQKIKYRLWADQNQLCAYSGKTINLPTLFSAEIEIDHILPYSLTLDDSYINKVVCFAKENQNKGQRTPKDAFGANEEKWNQITQALNRIPRELSKKRDAFYKTESDLLETDFTGSQLTDTRYMSKVAGDYLKTLGCDITFTRGIMTSWLRKQWGFNDLLGDSKEKERSDHRHHAIDAVVTACIDRPLYNALAKTAKELERTYSHLSMNDVYVEPTIANFKSKLSDKLDSMIVSFVPSKKITGALHEDTGVGFIDGIGTVFRARLDEKFDLKKAEKIIDPVVKGLVIRHLEKHNGNAKLAFATGFRLCHTDNKTLIKRVRVIQSKTTREELDQNKFSVIDRAGESFKWHAYGNIHHVAIFQHKTNNKYKSEFVTAADAARRARGIGGAKQPIIQKNGDNDWDFRFALHKNELVTVEYGGEERIFRVEGLERDVSVLSLRCQMAATKKDDSQKIRKSISTLMTGYKMQPIYVNAIGNRVNDKAHH

SEQ ID NO: 9450 - protein, 1029 aa, synthetic construct
  REGION 1..1029: note = Synthetic
MSKIFALDNGSNSIGWAVISADDKFQPIDIIDLGVRIFQKGVEDPRPTPKNQKRRAARLARRTIQRRARRKQKLLNFLMKNNLLPRELDGHLQPEGILNGLGDPYKLRAKALDHDLLPHELGRVLLHFVQRRGFLSNKKTLLGRDMLDDPDVLSVLDDDSDGGAGTSEETAFMADISLLRAEIAEGGFRTLGEYLSSKPSHECKRNRHEEHIRTDRRMYMDELALIFDRQSQCHQVLTAKIQSEIAHIIFHQRPIKLRKDRVGKCSLETNKKRVAIARLEYQRFRYLQDINNLAYFDHQTDKWVKINSADKDKLKVLFENSEKVTFPALKKVLGLQRSAEINLDSGVKHLKGNTTASSIRKVYPQWDDLCIEDQMLLVEDLISIKKKSALKQRLKSHWNLAGEEAVMLCLLELEPEYGNVSLKAIHKLLPHLNGGLIYSDARVAAGYGYEVKEIVVQDKLGLPPEIPNPIVQKGLHELRRVVNALIAEHGKPDVIRIEMARDLEMNTKKYKNFIAQQRKNTDLNDKAAKAFRGENTAITASKYPSRDQKIKYRLWADQNQLCAYSGKTINLATLFSAEIEIDHILPYSLTLDDSYINKVVCFAKENQNKGQRTPKDAFGANEEKWNQITQALNRIPRELSKKRDAFYKTESDLLETDFTGSQLTDTRYMSKVAGDYLKTLGCDITFTRGIMTSWLRKQWGFNDLLGDSKEKERSDHRHHAIDAVVTACIDRPLYNALAKTAKELERTYSHLSMNDVYVEPTIANFKSKLSDKLDSMIVSFVPSKKITGALHEDTGVGFIDGIGTVFRARLDEKFDLKKAEKIIDPVVKGLVIRHLEKHNGNAKLAFATGFRLCHTDNKTLIKRVRVIQSKTTREELDQNKFSVIDRAGESFKWHAYGNIHHVAIFQHKTNNKYKSEFVTAADAARRARGIGGAKQPIIQKNGDNDWDFRFALHKNELVTVEYGGEERIFRVEGLERDVSVLSLRCQMAATKKDDSQKIRKSISTLMTGYKMQPIYVNAIGNRVNDKAHH

SEQ ID NO: 9451 - protein, 1026 aa, synthetic construct
  REGION 1..1026: note = Synthetic
MGKTILGLDLGSNSLGWALLSAGPEGQPSGIIDTGVRIFPKAVEDKTPTPKNQKRRASRLARRTIQRRSRRKSRLLNYLIKLNLLPTELHGNLQPEGILNGLGDPYELRAKALDHDLNPHELGRVLLHFAQRRGFLSNKKTLLGRDMLDDPDVLSVLADDDQDDTDGSEETAFKKDISLLRAEITSGGFRTLGEYLASKPVHECKRNRHDEHIRTDRRMYMDEIALIYERQSKCTPVLSEEVQSNIEDIIFFQRPLKLKKDRVGRCSLEPSKKRAAIARLEFQRFRYLQDINNLQYFCQNTDQWVKLNEADKEKLGALFEASGKLTFAKIGKELGLQRGTSFNLDSGVKNLKGNTTSAAIRSALPDWDALSSADQFSLVEDLISIKKKSALKRRLMSHWGFTGEVALGLCLAELEPEYGQVSLKAIGKLMPHLAAGMIFSDARKAAGYGYEIAEVVAQDRLGRPPELPNPIVSKGLHELRRVVNALIAEHGKPDIIRIEMARDLEMNTKKYKNFIAQQAKNTKANDRAVEAFGEAQTNPTGSRYPNRDEKIKYRLWLDQGHCCAYSGKTINLATLFTAEVETDHIVPYSRSLNDSYMNKVVCFARENQAKGQRTPKDAFGADEDKWNQITQALKKLPRELSSKKDAFYKTDSDLLEHDFIGSQLTDTRYMSKVAGDYLKSLGSEVTFTRGIMTSWLRRQWQLNDLIGATSEKERTDHRHHAIDAVVTACIDRNIYKSLVDISRDLERSGSSLTMGDVYIDPPVPSIRDELDTHLTDMIVSHVPQRKITGALHEETGVGFVNDVGTVYRKRLDQNFDTKNALKIVDPIVRKLVQDHLAEHNSNAKEAFVPGFKLTHMDACTLIKRVRVVQAKTTRDELEKDKFGIKDRSGKVFKWHAYGNLHHVEVLRSRSTGKHKSVFVTAGEAAARARGIGRPREPIIFAEHGDDWELLYALHINELVEVSLNSERKIYRVQKLEQSNSALSLRCHTAANIKDTEQLIRKSINTLIQVYRLKPVNLNVLGKLLND

SEQ ID NO: 9452 - protein, 1027 aa, synthetic construct
  REGION 1..1027: note = Synthetic
MGKTILGLDLGSNSLGWALLSADGSGQPSGIIDAGVRIFPKAVEDKTPTPKNQKRRESRLARRTIQRRSRRKSRLLNYLIKLNLLPAELHGNPQPEGILNGLGDPYQLRARALDHDLTPHELGRVLLHFAQRRGFLSNKKTLLGRDMLDDPDVIAVLGEEEGQSDSDGSEESAFKADISLLRAEIKDGGFRTLGEFLASKPVHECKRNRHDEHIRTDRRMYMDELGLIFARQSSCHPILTEEVQGEIEDIVFFQRPLKLKKDRVGRCSLEPSKKRSAIARLEYQRFRYLQDINNLQYFCQNSDQWVRLNEADREKLGALFEVSDGLTFARIGKELGLQRGTSFNLDSGVKKLKGNTTSAAIRAALPEWDELASEVQFSLVEDLISIKKKSALKRRLMRHWGFTGKVALGLCLVELEPEHGQVSLKAIGKLMPHLVAGMVFSDARQAAGYGYEVAEIVAKDKLGRPPEIPNPIVSKGLSELRRVVNAIIAEHGRPDTIRIEMARDLEMNTTKYKKFVSQQAKNTKVNDRAIEAFRDAQSSPTGSRYPSRDQKIKYRLWLDQGHCCAYSGRSINLATLFTAEIEVDHIVPYSRSLNDSYMNKVVCFAKENQVKGQRTPKDAFGADEERWNQITQALGRLPRELSSKRDAFYKTEADLSEHDFIGSQLTDTRYMSKVAGEYLKTLGSEITFTRGIMTSWLRRQWRLNDLIGSTAEKERSDHRHHAIDAVVTACIDRQMYKSLVDISRDLERGQSGLTMDDVYIDPPISTIREELDGHLGGMIVSHVPQRKISGALHEDTGVGFVNNVGTVYRKRLDENFDAKGALKIIDPVVRSRVLEHLAKHNGKAKEAFAPGFKLTHVDGQTLIKRVRVVQAKMTKEALEKGKFGVMNSSGNVFKWHAYGNLHHVEVLRSQSTGKIQSVFVTAAEAAARARGVGRPAAAVITSDWGDEYELLFALHINELVQVTIKGECKVYRIQKLEQSGGVLNLRCHTAGNIKNKDQLIRKSLNSLIKDFELRPLIINVLGKLVND

SEQ ID NO: 9453 - protein, 762 aa, synthetic construct
  REGION 1..762: note = Synthetic
MGKTILGLDLGSNSLGWALLSADGNGQPSGIIDTGVRIFPKAVEDKTPTPKNQKRRASRLARRTIQRRSRRKSRLLHYLIKLHLLPVALHGNTQPEGILNGLGDPYQLRARALDHDLTPDELGRVFLHFAQRRGFLSNKKTLLGRDMLDDPDVIAVLGEEEEQSDSDGSEETAFKADISLLRGEIKDGGFRTLGEYLASKPVHECKRNRHDEHIRTDRRMYMDELGLIFARQSSCHSILTEEVQGEIEDIIFFQRPLKLKKDRVGRCSLEPSKKRSAIARLEYQRFRYLQDINNLQYFCQNSDQWVRLNEADKEKLGTLFEVSEKLTFARIGKELGLQRGTSFNLDSGVKNLKGNTTSAAIREALPEWDGLTSEVQFSLVEDLISITKKSALKRRLMTHWSFTGRVALGLCLVELEPEHGQVSLKAIGKLMPHLVSGMIFSDARKAAGYGYEVAEIVAQDKLAKPPELPNPIVSKGLHELRRVVNALIAEHGKPDIIRIEMARDLEMNTKKYKNFISQQAKNTKVNDRAIEAFRGAQTSPTGSRYPSRDQKIKYRLWLDQGNCCAYSGRTINLATLFTAEIEVDHIVPYSRSLNDSYMNKVVCFAKENQVKGQRTPKDAFGADEGKWNQITQALGRLPRELSSKRDAFYKTEADLSEHDFIGSQLTDTRYMSKVAGEYLKTLGSEITFTRGIMTSWLRRQWQLNDLIGTTAEKERSDHRHHAIDAVVTACIDRQMYKSLVDISRDLERGQSGLTMNDVYIDP

SEQ ID NO: 9454 - protein, 946 aa, synthetic construct
  REGION 1..946: note = Synthetic
MSKTILGLDLGSNSLGWALLSSGSKGGAGSIIDLGVRIFPKAVEDKTPTPKNQKRRNSRLARRTIQRRSRRKSRLLNYLIKLNLLPAELHGNAQPEGILNSLGDPYMLRAKALDHDLLPHELGRVILHFAQRRGFLSNKKTLLGSDMLDDPDVIAVLNDDGQDDTDSSEETAFKADISLLRAEIKSGGFRTLGEYLASKPVHECKRNRHDEHIRTDRRMYIEELTLIFARQSTFNPGLSEDVQSEIEEIIFFQRPLKLKKDRVGKCSLEPSKKRSAIARLEYQRFRYLQDINNLQYFCQNTDQWIKLNDVDKEKLGMLFEASSALTFARIGKELGLSRGTTFNLDSGVKNLKGNTTSFAIRVALPSWDDFTAEVQFSLVEDLISIQKKSALKRRLMSHWGFSGEVALGLCLVELEPEYGQVSLKAIGKLMPHLISGMIFSDARKAGGYGYEIKKVVAQDKLGLPPELPNPIVSKGLSELRRVVNAIIAEHGKPDIIRIEMARDLEMNTTRYKNFISQQAKNTKSNDRAVEAFRDAQTSPTGSRYPSRDQKIKYRLWLDQRQCCAYSGKTINLAKLFTADIEIDHIVPYSRSLNDSYMNKVVCFAKENQVKGQKTPKDAFGADEDKWNQITQALRHLPRELSSKRDAFYKTDADLSEHDFIGSQLTDTRYMSKVAGDYLKSLGSEITFTRGIMTSWLRRQWQLNDLIGRTAEKERTDHRHHAIDAAVTACIDRSIYRSLVEISRDLERSGSSLTMDDVYIDPPVPAIREELDTHLRDMIVSHVPQRKITGALHEDTGVGFVNNVGTVYRKRLDQDFDTKKAQNIVDPVVKALVQEHLAGHGGDAKKAFAPGFKLAHVGGGTLIKRVRVVQAKTTLDALERDKFGIKDSSGKLFKWHAYGNLHHVEVLRSGSMGKYRSEFITAAEAASRARGIGRPSAPIIQTEHGED

SEQ ID NO: 9455 - protein, 754 aa, synthetic construct
  REGION 1..754: note = Synthetic
MSKTILGLDLGSNSLGWALLSGGDEGAPGSIIDLGVRIFPKAVEDKTPTPKNQKRRNSRLARRTIQRRSRRKSRLLNYLIKLNLLPAELHGNAQPEGILNSLGDPYMLRAKALDHDLLPHELGRVILHFAQRRGFLSNKKTLLGSDMLDDPDVIAVLRDDGQDDTDSSEETAFKADISLLRAEIKSGGFRTLGEYLASKPVHECKRNRHDEHIRTDRRMYIEELALIFARQSTCNPALSEDVQSEIEEIIFFQRPLKLKKDRVGKCSLEPSKKRSAIARLEYQRFRYLQDINNLQYFCQNTDQWIKLNDLDKEKLGMLFEASAKLTFARIGKELGLSRGTTFNLDSGVKNLKGNTTSSAIRGALPSWDDLAAEVQFSLVEDLISIKKKSALKRRLMSHWGFSGEVALGLCLVELEPEYGQVSLKAIGKLMPHLISGMIFSDARKAGGYGYEIKKVVAQDKLGLPPELPNPIVSKGLSELRRVVNAIIAEHGKPDIIRIEMARDLEMNTKKYKNFISQQAKNTKSNDRAVEAFRDAQTSPTGSRYPSRDQKIKYRLWLDQRQCCAYSGTTINLAKLFTAEIEIDHIVPYSRSLNDSYMNKVVCFAKENQVKGQKTPKDAFGADEDKWNQITQALRHLPRELSSKRDAFYKTDADLSEHDFIGSQLTDTRYMSKVAGDYLKSLGSEITFTRGIMTSWLRRQWQLNDLIGRTAEKERTDHRHHAIDAVVTACIDRSIYRSLVEISRDLERSGSSLTM

SEQ ID NO: 9456 - protein, 948 aa, synthetic construct
  REGION 1..948: note = Synthetic
LIKLNLLPAELHGNAQPEGILNSLGDPYMLRAKALDHDLLPHELGRVILHFAQRRGFLSNKKTLLGSDMLDDPDVIAVLRDDGQDDTDSSEETAFKADISLLRAEIKSGGFRTLGEYLASKPVHECKRNRHDEHIRTDRRMYIEELALIFARQSTCNPALSEDVQSEIEEIIFFQRPLKLKKDRVGKCSLEPSKKRSAIARLEYQRFRYLQDINNLQYFCQNTDQWIKLNDLDKEKLGMLFEASAKLTFARIGKELGLSRGTTFNLDSGVKNLKGNTTSSAIRGALPSWDDLAAEVQFSLVEDLISIKKKSALKRRLMSHWGFSGEVALGLCLVELEPEYGQVSLKAIGKLMPHLISGMIFSDARKAGGYGYEIKKVVAQDKLGLPPELPNPIVSKGLSELRRVVNAIIAEHGKPDIIRIEMARDLEMNTKKYKNFISQQAKNTKSNDRAVEAFRDAQTSPTGSRYPSRDQKIKYRLWLDQRQCCAYSGTTINLAKLFTAEIEIDHIVPYSRSLNDSYMNKVVCFAKENQVKGQKTPKDAFGADEDKWNQITQALRHLPRELSSKRDAFYKTDADLSEHDFIGSQLTDTRYMSKVAGDYLKSLGSEITFTRGIMTSWLRRQWQLNDLIGRTAEKERTDHRHHAIDAVVTACIDRSIYRSLVEISRDLERSGSSLTMDDVYIDPPVPAIREELDTHLRDMIVSHVPQRKITGALHEDTGVGFVNNVGTVYRKRLDQDFDTKKAQNIVDPVVKALVQEHLAGHGGDAKKAFAPGFKLAHVGGGTLIKRVRVVQAKTTLDALERDKFGIKDRSGKLFKWHAYGNLHHVEVLRSGSTGKYRSEFVTAAEAAARARGVGRPSAPIIQTEHGEDWELLFALHINELVQVLVDGDTRIYRVQQLERDGARLSLRCHTAASLIDKGQLIRKSINVLISDYQLRPLNLNVLGKCVDD

SEQ ID NO: 9457 - protein, 1025 aa, synthetic construct
  REGION 1..1025: note = Synthetic
MSKRVLGLDLGSNSLGWALLEEQDGTVNKFIDIGSRIFSKAVEEKTPTPKNVKRRDMRLGRRVLQRRARRKQRMLNYLVSLNLLPAELQKNTQPEIQLNKMGDPYQLRAKALDHQLTPYEFGRVLLHFVVRRGFLSSKKQLAGDLVDDPDTMAYLNELDKKPTKDKEEGAFKSDIAEVRNAIEKSGYRTLGEYLHNIEIGECKRNRSHEGGHLRTDRKMYQDELAEIWKQQHQYFNHLPNDFMEENKGIKQVIFYQRPLKLKQNRIGKCSLEPKNNRAATARLEVQRFRYLQDVNNLEYFERELDQWLKLDDAKKQKLIKYFEQHKSINISTLKKELGFDSHYKFNLEMKNLKGNITAFEIKKILENMWDDFSQQQQKALVDDLLSIKKKSALKNRLIKHWGLQTSQAIQLCLLELEPGHSSHSLKAINKLLPYLEKGLVYADARVEAGYDYEPEEITAQEKLGAPPETANPIVNKGLHELKRVINAVIKQYGKPDIVRIEMARDLEMNTKRYKDNEARQKKNKEENENAVEAYKGLNLGSYPSYDDKIKYRLWQEQNHFCAYSCKAIPVNAVFTANVEIDHILPYKKSLDDSYMNKVLCFTAENRNKGDRTPKDAWGSNEEKWNQMTQAINGWKGLDPKVKRFFQTETDLQKRDFISSQLNDTRYISKLAIEYVKQLGCDVTTSKGVTTAWLRHQWGLNNLIGETDKKERTDHRHHAIDAAVVACVDRSLYKQILSWTKNNTKELKINSPYPNFRDELDEQLKHVIVSHNTQRKLSGGLHEETGAGYIEKHGGLVYRKNLTPDFTEKNAKSIIDDTVKKQVIEHLEKYENKPKAAFADNITVCHKDGKTPIKRVRVLQSKTTLKKLEKNKLGIKDKTGKVFKWMAYGNMHHVEIIQHKKTGKYKGEFITMMEAHRRAMTGTKSAARRGVERESIIKNSQGDDWSFIMALHINDLVSVGKGDGEREFYRVQKLDTGSNRMVIRLHTAAKLDNKKEEIYFSFNDASFKKWDLRKHQINAIGVLSHD

SEQ ID NO: 9458 - protein, 721 aa, synthetic construct
  REGION 1..721: note = Synthetic
MSKKILGLDLGSNSLGWALLEEKDGTVCKFIDIGSRIFSKAVEEKVPTPKNVKRRDMRLGRRVLQRRARRKQRMLNYLVSLNLLPKELQGHTQPEILLNEIGNPYELRTKALDEQLKPHELGRVLLHFVARRGFLSSKKQIAGDLVDDPDTITYLNELDDKPTKDKEEGQFKADIANVLLAIQEGSYRTLGEYLHNLEQGKCKRNRSHEGGHLRTDRKMYQDELEQIWEKQNQYFPHLPNDFFYDNEGIKRIIFYMRPLKLKKDRIGKCLLEPQKYRAAKARLEAQRFRYLQDVNNLAYFERQTDQWISLDHEKKQKLIEYFEHHPFINITNLRKELGFDKTYKFNLEMKNLKGNITACDIRAVLNTIWDEYTNEQQEALVEDLLSIKKKSALKTRLINHWNLDTSQAVQLCLLEFEPGHSNHSLKAIKNILPYLEKGHLYSCNTKDKPKGALQLAYPNANQQITINNAKLGTPPETANPIVNRGLHELKRVINAIIKQYGKPDVIRIEMARDLEMNTKRYKNNEAKQAKNKKENEKAVDAYRGLNLGKYPSYDDKIKYRLWQEQNHSCAYSGKTIPLNAVFTAEVEIDHILPYKKSLDDSYMNKVLCYTSENQNKGDRTPKDAWGGNEEKWNQITQAISGWKGLDSKVKRFFQTDSDLQKRDFISSQLNDTRYISRLALEYVKELGCDVSTSKGVTTAWLRHQWGLNNLIGETDKKERTD

SEQ ID NO: 9459 - protein, 686 aa, synthetic construct
  REGION 1..686: note = Synthetic
MSKKILGLDLGSNSLGWALLEQKDGEVCKFIDIGSRIFTKAVEEKVPTPKNVKRRDMRLGRRVLQRRARRKQRMLNYLVSLELLPKELKGNFEPEIILNNIGNPYQLRAEALDRKLDPFELGRILLHLVARRGFLSTKNQAAGDLIDDPDTTAYLEALDKEPSKDKEEGAFKSDISELRQQIKDKEYRTLGEYLYKETQQNNISAKRNRIHEGGHLRTDRQMYRDELDKIWAKQKQYFKNLPEDFMQENKGIKQIIFYQRPLKLKKDRVGKCALEPKKYRAPKARLEVQRFRYLQDVNNLKYFERQTDKWVALDHEKRKSLIEYFEQNSRATITALKKLFGLDKTYKFNLETKDLKGNITACEIRDVVGELWDSLPDYQQVALVEDLLTIKKKSILKKRLINHWGFTTEQAVKLCLIEFEPGHSNHSLKAIRKLLPHLKQGCLYSSNSDDKQKGALQQAYPNIGESVSQIKNYLGSPQGTSNPIVNRGMHELRRVVNAIIQQYGKPDVVRIEMARDLEMNTKRYKENQFRQEKNKKANEKAVDAYKSLNLGKYPSYDDRIKYRLWEEQDRLCAYSCKPIPLNAVFTAKVEIDHILPYKKSLDDSYMNKVLCYAAENRFKSDRTPKDTWGDNDERWTQITQAIKSWKNLTSKVNRFYKIEKDLQDRDFISTQLNDTRYISRLAIEFI

SEQ ID NO: 9460 - protein, 791 aa, synthetic construct
  REGION 1..791: note = Synthetic
QSIKNYSTLKDFVMQQQILGLDLGSNSIGWALLKEENGQASEIIDLGSRIFIKAVEEKVPTPKNEKRRNMRLGRRVIQRRARRKQRMLNYLVSLGLLPTALQNNTQPEITLNELGDPYELRTRALDTQLTPHQFGRVLLHFVARRGFLSTKKQVAGDLVDDPDTLSYLNDLDDKPSKDKEEGQFKADITEVYKEIKSSGARTLGEYLFNLEIGKVKRNRSHDGGHLRTDRAMYQDEIKQIWERQSRHFEHLPNDFMQKDKGVLAIIFYQRPLKLKKDRVGQCSLEPKQRRANVSRLEVQKFRYLQDINNLQYFDRYQEKWICLNEDQKTKLKTFFEKNSKITVTKLKAELGLDKPTKINLEAKNLKGNVTACDIRNVIDEQWDKYSEKQQKALFEDLFTIKKKSALKARLITHWDFDKKTAVKLCLLEFEPSHSNHSLKAINKLLPYLEQGMIYSDARQAAGYDYEVEDIEVQETLGMPPETSNPIVNKGMFELRRVINALIKEYGKPDIVRIEMARDLEMNTKRYKENEARQKKNQKANEEAQEAFEGLNLGKKYASRDDKIRYRLYQEQDQRCAYSGQSIALNQVFSSECEVDHILPFKKSLDDSYMNKVLCFTKENRNKSDKTPIDAWGGDNDKWNQITQAISHWDDNLKSKVSRFFTKEADLQKRDFISSQLNDTRYISKLAQDYVRQLGCDVNVTKGFVVSQIRHQWDFNSLIGELDKKERTDHRHHAIDAVVIASTSRALYTQAVRQIERDKLTIAPPYPHIREELAERLKHTIVSHAPQRKLSG

SEQ ID NO: 9461 - protein, 799 aa, synthetic construct
  REGION 1..799: note = Synthetic
MNKKILGLDLGSNSIGWALMNEADDEVNQIIDLGSRIFNKAVEEKVPTPKNQKRRDMRLGRRVLQRRARRKQRMAHYLISLDLLPQELSNNFGQEKLLNELGDPYELRTKGLDEQLKAHEFGRVLLHFVARRGFLSSKKQIAGDLVDDPDTQTYLSTLDSRQTRGEEGQFKADIAQVYQAIEDNNARTLGEYLFNLEVGKVKRNRSHDGGHLRTDRAMYKDELCKIWKKQQVYFDLPDEFISEVKKIIFYQRPLKLRKDRVGKCSLESKHYRANTARLEVQKFRYLQDVNNLEYFERHSEQWLKLSDEQKDKLKIYFEYHPEIAITALKNELGLDKPTKINLEKKNLKGNITACEIRDVIGNSWDEYSNKEQIQLFEDLFTIKKKSSLKARLITHWDFDKQTAVKLCLIEFEPSHSNHSLKAIKALLPFLEQGLRYDQARVEAGYGYEQKEVEVQNNLPAPPETSNPIVNKGLHELRRVVNAVIKQYGKPDIVRIEMARDLEMNTTRYKENQKRQKDNQQANERATKAFIEETGEKYPSHDEKIRYRLWEDQSYRCAYSGHTIALGQVFSADCEIDHILPFKKSLDDSYMNKVLCFEKENQNKADKTPIDAWGGDNNKWNQITQAISRWDKSLKSKISRFYMRENDLERGFISSQLNDTRYISRLAQNYMRELGCDVNVTKGFVVSQIRHQWGFNNLIGETDKKERTDHRHHAIDAVVIASTSRSLYQQAVNQIERNKLKIPQPYNDILQELGEKLKHMIVSHTPQCKLSGGLHEETGAGYIAKHGGLVYRKTLNPKFS

SEQ ID NO: 9462 - protein, 1027 aa, synthetic construct
  REGION 1..1027: note = Synthetic
MSKKILGLDLGSNSLGWALLEEENGNANKIIELGSRIFIKAVEEKVPTPKNVKRRNMRLGRRVLHRRARRKQRMLNYLVSLDLLPKVLHGNKQPEIVLNEIGDPYALRAKALDSKLTPHEFGRVLLHLVARRGFLSSKKQAAGDLVDDPDTVAYLDKLDEKPSEDKEEGAFKVDISLIREAIEAAGARTLGEYLFKLAQGKCKRNRSHEGGHLRTDRKMYQDELEKIWQQQAQYYSHLPDDFMVNRKGIKQIIFYQRPLKLKKDRVGKCSLEPRNYRAATARLEVQRFRYLQDINNLQYFERHSDKWLCITEEDRKKLVHYFEYHPKITITKLKTELGLDRPTKINLETKNLKGNITACEIRSVLGESWNQFSNETQLALVEDLLSVKKQSALKTRLLNHWKFEKKQAVQLCLLEFEPAHSNHSLRAINKLLPFLEQGMIYSDARIKAGYDYAPDSIEPQVKLGAPLETANPIVNKGLHELRRVINAIIKQYGKPDIIRIEMARDLEMNTKRYKENEARQTKNKKENEQAVNAYKKLKLGKYPSHDDKVKYRLWKEQNHYCAYSLKPIPDHVIFTAEVEIDHILPFKKSLDDSYMNKVLCYASENRNKGDRTPKDAWGGNEEKWNQITQAISGWKGLDSKVKHFFQTEEDLQKRDFISSQLNDTRYIAKVALEYIKQLGCDVSVTKGYVVSQIRHQWGLNDLLGETDKKERTDHRHHAIDAAVIAATSRSLYKNAVAQIQREKLKIAPPFTDFRTAVEEHLKHVIVSHATQKKLTGGLHEETGAGFIERHGGLVYRKNLAPDFTGKNANSIVDETIKNIVLDHLNKHENDPKKAFADGVNIYHKDGKTPIKRVRVLQSKTTLQELEQGKLGIKDKNGKIFKWMSYGNIHHVEILKDKNTGKYTGEFVTMMEAHRRAMTETKSAKKRNVHPEPIIRQVHDDDRIFVMALHKNDMVSVKKGENERKFYRVQKLGGGYDLTLRLHSETSTKREKVLIESKKMLENSFNNFITSFDLKLHKINVLGILDHD

SEQ ID NO: 9463 - protein, 799 aa, synthetic construct
  REGION 1..799: note = Synthetic
MNKMVLGLDLGSNSLGWALLEEVDGSPCRIIDLGSRIFSKAVEEKVPTPKNVKRRDMRLGRRVLQRRARRKQRMLNYLTSINLLPVELQGHAQPEVLLNKIGDPYELRAKALDHELTPYELGRVLLHFVARRGFLSAKKQVAGDLVDDPDMLAYLNELDEEPTKDKEEGAFKADISELRKAIEESGARTLGVYLHQLEQGKCKRNRSHDGGHLRTDRKMYQDELAQIWHEQKNYFSRLPDDFMADNQGIKKIIFYQRPLKLKKDRIGRCSLEPTKYRAATARLEVQKFRYLQDVNNLEYFERYTDQWLKISEENRQKLIGYFECHEKITVTALKKLLGVDKLTKFNLEAKNLKGNTTACEVRSVLGEVWDNYSEDQRSELVEDLLSIKKKSALKTRLIGCWKLHQSQALQLCLLEFEPGHSNLSLKAINKLLPFLKQGDIYSDARKKAGYGYEIEEIDPQEKLNAPPVTANPIVNKGLHELKRVINAIIKQYGKPTSIRIEMARDLEMNTKRYKENEARQNKNKKENEAAVTAYRSLNLGNYPNHDDKIKYRLWQEQDKRCAYSNKVIPLNGLFTAEVEIDHILPFKKSLDNSYMNKVICFTAENRTKGDRTPKDAWGGNEEKWGQITAAISHWKGLESKVSRFYQTETELSQRDFISSQLNDTRYISKLALEYVSQLGCDVSVTKGYVVSQVRHQWGFNDLIGETDKKERTDHRHHAIDAVVIAATSRSLYKKAVAEIQRNKLKIAPPYPHIRDELNERLKHTIISHAPQRKLSGGLHEETGAGFIERHGGLVYRKNL

SEQ ID NO: 9464 - protein, 748 aa, synthetic construct
  REGION 1..748: note = Synthetic
MGKKILGLDLGSNSLGWALLEEVEGQVSSIIDIGSRIFTKAVEEKVPTPKNQKRRDMRLGRRVVQRRARRKQRMLNYLVSLDLLSNELQRNFQPELILNSLGDPYYLRAKALDEQLTRHEFGRILLHFAARRGFLSTKKQVAGDLIDDPDTLSYLNQLDDKPSLDKEEGAFKADISELRNSIETSGSRTLGEYLYKLEHGICKRNRSHDGGHLRTDRAMYKDELNLIWEKQKQFFPDLPDDFMTDNKGIKQIIFYQRPLKLKKDRVGKCSLELEKNRAPMARIEVQRYRYLQDINNLQYFERHSEQWLSISKSDKQKLVEYFEKNLKITVAALKKELGLDKLTKINLETKNLKGNITACEIRGVLGERWDHYSDQDQHALVEDLLTIKKKSALKTRLLNHWTLSASEAVKLCLLEFEPGHSNHSLKAINKLLPYLEQGYLYSEARVKAGYDYEIVKIEPHDTLCAPDTTSNPIVNKGMYELKRVVNAVIKQYGKPNAIRIEMARDLEMNTKRYKENEKRQGQNKKANEVAVDAYKGLKLGRYPSRDDKIKYRLWEEQSHRCAYSNKTIPLNAVFTAEVEIDHILPFKKSLDDSYMNKVLCYTAENRIKGDRTPIDAWRGNAEKWNQMTQAIGKWKGLESKVNRFYQTEEDLQKRDFISSQLNDTRYIAKLAQEYVKQLGCDVSVTKGFVVSQIRHQWGLNDLLGETNKKERTDHRHHAIDAVVIAATSRGLYKKAVSQIQRNKLNIPV

SEQ ID NO: 9465 - protein, 759 aa, synthetic construct
  REGION 1..759: note = Synthetic
MGKKILGLDLGSNSIGWALLEEVNGEANSIIDIGSRIFTKAVEEKVPTPKNVKRRDMRLGRRVLQRRARRKQRMLNYLVSLDLLSNELLRNHQPEIILNELGDPYELRSKALDEKLTRYELGRVLLHFVARRGFLSTKKQVAGDLIDDPDTIAYLNEIEDKPTQDKEEGAFKADISEVRKAITLSGARTLGEYLHQLDKGVCKRNRSHEGGHLRTDRAMYKDELDLIWQQQQQFFSDLPADFMEDNKGVKEIIFYQRPLKLKKDRIGKCSLEPKNNRASMARLEVQRFRYLQDVNNLQYFERQTDQWLAFTQADRQKLIEYFEQHPKITITALKKLLGLDKLTKINLEAKNLKGNITACEIRNVLKDRWDNYSDKEQFNLVEDLLSIKKKSALKTRLIKHWGLGAEVAIKLCLLEFEPSHSNLSLKAINKLLPFLQQGLIYSKKDQQTGELGALQAAGYSDEIKEQEVSNKLGAPLETSNPIVNKAMHELKRVVNALIKEYGKPDIIRIEMARDLEMNTKRYKENEARQNKNKKANEGAVEAYKGLNLGKYPSYDDKIKYRLWEEQNRRCAYSNEMIPLHSVFTSSVEIDHILPFKKSLDDSYMNKVLCYVAENRNKGDRTPKDAWSGNVEKWMQITQAISKWKGVDSKVKRFHQTEADLQKRDFISSQLNDTRYISKLALDYMAELVGNSNVSVTKGSVVSQIRHQWGFNDLIGEVEKKDRTDHRHHAIDAVVIAATSRSLYTKAVKQIERDKLKIEP

SEQ ID NO: 9466 - protein, 702 aa, synthetic construct
  REGION 1..702: note = Synthetic
LIDDPDTIVFLNELDDTPTEDKEETAFKADISEVKKAIDSAGARTLGEYLHKLVRGECKRNRSHEGGHLRTERKMYQDELALIWQQQSQYFSHLPNDFMETDQGIKQIIFYQRPLKLKKDRIGKCSLEPKNNRAPMARLEVQRFRYLQDVNNLQYFERHTDQWLSISNDDKQKLIEYFEHHPKITITELKKQFGFKINLEAKNLKGNITACDIRSVLNEQWDNYSGVSQYALVEDLLSIKKKSALKTRLIKHWGLDASKAIELCLLEFEPSHSSLSLKAINKLLPFLNQGLIYSKKDKGTGELGALQAAGYDDELKEQEVLDKLVQPIATSNPIVNKGLHELKRVVNAIIKQYGKPDVIRIEMARDLEMNTERYKENEARQAKNKKENEKAVVAYKDLKLGKYPSHNDKIKYRLWEEQNYCCAYSNNSIPLSAVFTAQVEIDHILPYKKSLDDSYMNKVLCFTAENRNKGDRTPRDAWSGDAEKWTQITQAISRWKGVDSKVKRFCQTEDDLQKRDFISSQLNDTRYIAKLALDYVKQLGCDVSVTKGFVVSQIRHQWGFNDLLGETNKKERTDHRHHAIDAVVIAATSRQLYAKAVNQIERNKLKIEMPYPHIHDELKERLEHTIVSHASQRKISGGLHEETGAGYIEKHGGLVYRKNISPDFTVKNAQSIVDETVQALVLSHLESYDNVPKKAFADDVTL

SEQ ID NO: 9467 - protein, 790 aa, synthetic construct
  REGION 1..790: note = Synthetic
MVKKVLGLDLGSNSLGWALLEEIDGSASSVIDIGSRIFVKAVEDGAAQTPKNVQRRDKRLGRRVIQRRSRRKQRMLNYLVSLKLLPSELQGDTQPEIILNELGDPYDLRAKGLDSQLTAYEFGRILLHFVARRGFLSTKKQVAGDLIDDPDTIVFLSELDDKPTKDKEEGAFKADIGEVRAAINESGARTLGEYLYKLAQGQCKRNRSHEGGHLRTDRKMYQDELALIWERQRQYFEHLPDDFMAKDQGIKQIIFYQRPLKLKKDRVGKCSLEPKNNRAPLARLEVQRFRYLQDINNLQYFERHTDQWLNIRDKDKQALADHFESHLKITMRPLKKLLGLDNLTKFNLEAKNLKGNITACEIRSVLNEQWDNYSEESQYALVEDLLSIKKKSALKTRLIEHWGLEKSKAIALCLVEFEPGHSNLSLKAINKLLPFLRQGLIYNKKDHESGELGALQAAGYDDVSEELEILDKLPKPIETSNPIVNKGLHELRRVVNAIIKQYGKPDVVRIEMARDLEMNTKRYKENEARQAKNKKENEKAVDAFRDLNLGKYPSHNDKIKYRLWEEQGHCCAYSNKTIPLSTVFTAQVEIDHILPYKKSLDDSYMNKVLCFTAENSTKGDRTPKDAWGGNDEKWTQITQGISHWKGVDSKVKRFYQTETDLQKRDDFISSQLNDTRYIAKLALEYITLLGCDVSVTKGFVVSQIRHQWGFNDLIGEVNKKDRTDHRHHAIDAVVIAATSRQLYKKAVNQIENNKLKIDPPYLEIRDELAQQLKDTVVSHASHRKLSGGLH

SEQ ID NO: 9468 - protein, 709 aa, synthetic construct
  REGION 1..709: note = Synthetic
MSNRVLGLDLGSDFLGWALLEETNGSVKSIVDIGNRIFTRAVEDKVPTPKNVKRRNMRLGRRVIQRRSRRKQRMLNYLVSLELLPKGIQGHTQPEITLNELGDPYELRVKALDRQLTPHEFGRILLHFVARRGFLSTKKQAAGDLIDDPDTIIFLNKLDNESADSKEEGSFKADIKEVYASINASGSRTLGEYLHKLAQGQCKRNRQHEGGHLRTERKMYQDELALIWIEQEQYFSHLPTDFMSKDQGILQIIFYQRPLKLKNNKVGTCSLEPKNYRAAMARLESQQFRYLQDINNLQYFKPNTGQWLRISHEDKKTLISYFEHNPRVTITALKKQLGLKRLNKTNLEAKNLKGNVTACEIRSVIGEQWDNYEEEKQADLVEDLLSIKKKSALKTRLISHWGMSKAKAFELCLLEFEPGHGSLSLKAQKKLLPFLKQGLIYSRNDHATGELGALQAAGYLDAEKEQQDFDKLGVPVKTSSPIFNRALHELRRVVNAIIKQYGKPDIIRIEMARDLEMNTKRYKENEFQHLKKRKENEKAVDAYKKLALGKFPSHNDKIKYRLFADQGHSCAYSNKTIMLSQVFTTQVEIGYILPFKESLDDSYMNKVLCFVSENRTKGDRTPKDAWSGDDDKWLQITQAINRWKGLDSKVKRFYQTEADLQKSDFIALQLNDTRYIAKIALAYLQQLGCDVSVTNGYLVSQIRHQWGFN

SEQ ID NO: 9469 - protein, 719 aa, synthetic construct
  REGION 1..719: note = Synthetic
MSKQKVLGIDLGSNSIGWALLDEIDGKPCGIIDIGCRIFAKAVEEKTPTPKNAKRRHARLLRRVIQRRARRKQRLQNYLLKLELLPETLRDNPAPEQILNELGDPYQLRKLALDEALQPYQLGRVLLHLVQRRGFLSSRKTLLGDLVNDPDAIDFLADLEDDEGDGSERAKEETAFKQDIALLKQAIETTNCRTLGEYLASLNPRQQNQRNRLHAGGHLRTDRQMYFDELEQIFAKQQAFHPQLTFEVQEEIQHIIFFQRPLKLRADRVGRCSLEPKYNRARLARLQSQQFRYLQDINNLKFFERYSEQWLSLKESDRAKLIQLFEQHAEVSIAGIRKTLGFDKHTEFNLERGNKKLKGNTTACKIRGVLNDWDQYSEDRQQALVEDLLTIQKKSVLKRRLIQHWQFDATTAVKLCLLEFEPGHVSLSSKAINRLLPYLKQGLIYPEARKQIPEYDYESEKIAAVNRLGPPPETPNPIVNKGLHELKRVINALIAEHGKPDVIRIELARDLEMNTKRYAEFTKQQKANTKANDEAQEKFQEQRKLSQHLGLRETASKTDRLKYRLWRDQEGLCAYSTRSISLSVLFSPEIEIDHILPFSESLDDSYMNKLVCFVEENRFKGQRTPIDAFGKSEQRWTQITQAISKWVKKDRRLAGKKDKFFMTAADVQKRDFLSSQLNDTRYIGKLAMAYLQTLGVEITASKGITTAWVRHQWNLNSLL

SEQ ID NO: 9470 - protein, 980 aa, synthetic construct
  REGION 1..980: note = Synthetic
MLETLIQQGLLPQELSIHPQPEIILNVLGDPYLLRAKALDEKIEAHELGRVLLHLVQRRGFLSNRKTLLGDMLDDPDVQTVLNEIEQDEDLSDERAKEESAFKKDIAELRREIALANCRTLGEYLAGFGRHQCRRNRAHDGGHLRTDRQMYQEELDLIWQTQQEYHPQLTEAFKETIERIIFYQRPLKLKADRIGKCSLEPKYNRIRIARLEYQRFRYLQDINHLEYLESQTDRWLKLDKAQRNKLVELFEREANITLPKIRKTLGFDRSVEINLERGDKKLKGNITACEIRKILPDWDGFDAERQQALVEDLLTFQKKSALKKRLTTHWRFSPEIAVNLCLLEFEPGHGNLSCKAIRKLLPFLERGEIFSDARISAGYDYEPDNITAIDKLGPPPEIANPIVLKGLHELRRLINALIAEYGKPDAIRLEMARDLEMNTQRYAEFTKQQKANTKANNEAAEKFGEMRRLNPHLQLSRYPSRDDKLKYRLWRDQNQCCAYSGQTISLSTLFGSEIEIDHIVPYSESLDDSYMNKVVCYAKENRNKGQRTPIDAFSGNEKQWNQIVQALDRWPKSLQAKKRRFFMTGAEIQKRDFIANQLNDTRYLSRVALQYLKPLESDISVSKGQTTAWVRHQWGLNNLIGDNDKKDRSDHRHHAIDALAIACIDRSFYRNLVETAKQLERQRSQLTMRDIQVDPPWPNLRDDLQQKLSEMIVSHAPQHKLSGPLHKDTGVGFISGKGTVYRKNLAEYFKECNSNKKAEKLLQNIVDPTVASLLREHLSSHQYNGKRAFSDKIKVYHKNKKTPIPIKRVRVYETVQIKKYTQLEKEKFPVKNKNGEIFKWYSFGNIHHIEIVENLVKKQYIGFFVTMMEGHRRAMTGTKSAIDRGVKIEPIINKNHGNQYKFIMALHKRDTVSLNINGQRQFFQISKLGQLTQGQQPRPELIPVTVAKDKNGAVSDSIKSLMENYDLKLHKINAIGKILS

SEQ ID NO: 9471 - protein, 556 aa, synthetic construct
  REGION 1..556: note = Synthetic
MSKMVLGLDLGSNSIGWALLEQQDGKPNRIINLGSRIFIKAVEEKTPTPKNAKRRNARLIRRVLQRRARRKQKMLNYLLSLKLLPDELQDNYSPEAILNSLGNPYKLRAKGLDQALTAYELGRVLLHLVQRRGFLSNRKVLLGDMVDDPDVIAELNVLEESDEEQTARDKEETAFKKDIAELRATINQANCRTLGEYLATLDHHDCKRNRLRSGGHLRTDRQMYREELALIWEQQIQHHPILTEQVREKFEQIIFYQRPIKLKADRLGKCSLEPKRQRANIARLESQRFRYLQDINNLQYFENQTEQWLKLNLQQREKLIAVFEVEASISFAKIRKTLGLDKSQEINLERGSKKLKGNITACEIRKILSIWDDLSNQQQLALVDDLLTFEKKSALKKRLINHWQFTPAIAVNLCLLEFEPGHSNLSTKAINALLPYLQQGQLYSDARISAGYGYEVEQQAIVEKLGKPPETANPIVRKGLHELKRLVNAIIAEYGKPDAIRVEMARDLEMNTKRYAEHEKQQKANTKANDDATAKFQEQRALSPHLALSHYPSKTD

SEQ ID NO: 9472 - protein, 661 aa, synthetic construct
  REGION 1..661: note = Synthetic
MSKTVLGLDLGSNSIGWALLEQQEGKPNRIINLGSRIFIKAVEEKTPTPKNAKRRNARLTRRVLQRRARRKQKMLNYLLSLKLLPDELQDNYSPEAILNSLGNPYKLRAKGLDQALTAYELGRVLLHLVQRRGFLSNRKVLLGDMVDDPDVIAELNVLEESDEEQTARDKEETAFKKDIAELRATINQANCRTLGEYLATLDHHDCKRNRLRSGGHLRTDRQMYREELALIWEQQIQHHPILTEQVREKFEQIIFYQRPIKLKADRLGKCSLEPKRQRANIARLESQRFRYLQDINNLQYFENQTEQWLKLNLQQREKLIAVFEVEASISFAKIRKTLGLDKSQEINLERGSKKLKGNITACEIRKILSIWDDLSNQQQLALVDDLLTFEKKSALKKRLINHWQFTPAIAVNLCLLEFEPGHSNLSTKAINALLPYLQQGQLYSDARISAGYGYEVEQQAIVEKLGKPPETANPIVRKGLHELKRLVNAIIAEYGKPDAIRVEMARDLEMNTKRYAEHEKQQKANTKANDDATAKFQEQRALSPHLALSHYPSKTDKIKYRLWLDQNRSCAYSCKPIELSSLFGPEIEIDHILPYSESLDDSYMNKVVCYTKFNRQKAQQTPIDAFSSNPDQWSQITQALKHWDRRLTAKKNRFYMTAAEV

SEQ ID NO: 9473 - protein, 808 aa, synthetic construct
  REGION 1..808: note = Synthetic
MIDDPDVQEVLEEFEKEEDTSSDRAKEETAFKKDISLLKEKITSNKCRTLGEYLATIDSSHCRRNRFHDGGHLRTDRQMYRDELDLIWEQQTEHHNVLSEKVKGEIESIIFYQRPLKLRADRIGRCSLEPSRKRSKIARLEYQRFRYHQDINNLNYIDPYSDTIKQLTDEDRERLIEFFEVTPSITFPKIKKLLGLDRGIEFNLEEGGNKKLKGNITACTVREVLPDWDALNYDKQIELVEDLTTIQKKSVLKKRLIEHWCFTPTIAVNLCMLEFEPGHGNLSLKAINLLLPYLIKGYLYSDARQAAGYGYDQEEIAIAERLQRPPETTNPIVNKGLHELRRVVNALIAEYGRPDAIRIEMARDLEMNTKRYKARMKQQRENTKANDRAIDTYQGIAQKNSQLGLSRYPSRNDKIRFRLWEDQDHLCAYSCKSINLTTLFSAEIEVDHILPLSESLDDSYMNKVVCFASENRQKEQRTPIDAFGNNTKKWEQISQALSRWNKKLNSKKNRFYMKKADVQKRDFINSQLNDTRYISRVALEYLSSICSDISTSKGVTTSWLRHQWGLNSLIGESDKKERTDHRHHAIDAVVVATVDRRLYKTLVGSAKEIEGSQTGITMNDLYLDPPWSSIRSDLEQQLEGVIVSHCPLTKISGALHKETGVGFIKGKGCVYRIPLNTEFKNTHASKIIDNSVREIVINHMNQYNGDSKAAFADGVSVFHKDEKTPIKRVRILQSATSLSKLKQSKFGVRNQQGEVFKWHAYGNTHHVEIIKNNKNGRVKGQFVTMMEAAQRARGIGTEKQPIIQTKHG

SEQ ID NO: 9474 - protein, 672 aa, synthetic construct
  REGION 1..672: note = Synthetic
MSKKILGLDLGSNSVGWALLEEEAGKPVGFLGSGVRIFTRAVEEKTPTPKNVKRRQRRLARRVIQRRARRKQRLLGFLIKLDLLPSTLTVQGQPEKILNGLGDPYALRAKALDEPLSQYELGRALLHLVQRRGFLSTRKTTLGDMVYDPDVAAVLGELESEEDTSSDRAKEETAFKKDISQLRDDIAESGCRTLGEYLSQRSGQEPKRNRTHDGGHLRTDRQMYREELAAIFEAQTPHHDVLTDEVKSEIEEIIFKQRPLKLRSDRVGKCSLEKKNTRARMARLEVQRFRYLQDINNLQYFDPYSDAFVSLGAEDRDKLMELFESKSAVTFPQIRKTLGLDKKTEFNLDYGTKKLKGNITATSIRGVWENWDDLDDEKKHALVEDLITINKKSVLKKRLMNHWGLDANDAVNLAMLEFEPGHANLSLKAINRLLPFLAEGQIYSDARVSAGYGFDIAEVEPTEHLGPPPEIPNPIVAKGLSELRRVINALIKEYGKPDAIRIEMARDLEMNTKRYAQYLKQQKVNTAANEEATEEFKGIGAANPHLGLSAYPSRADKIRYRLWKDQNHLCAYSGSTISLSQLFSGEVEVDHILPLSESLDDSYMNKVICLTAENRKKGQRTPVDAFSADEDKWSQMVSRVTGWDKKLRSKRERFFMTGSDVIKRDFINSQLN

SEQ ID NO: 9475 - protein, 804 aa, synthetic construct
  REGION 1..804: note = Synthetic
MVKKGQRTILGLDLGTNSIGWALLAEEQGELKSIIDLGSRIFTKAVEEKTPTPKNVKRRDARLGRRVLQRRARRKQRMLNFLVSLDLLPQTLQDHTQPEIILNRLGDPYTLRAAGLDQSLRPHELGRVLLHLVQRRGFLSNRKTLLGDLIDDPDVQSVLHEMGEDDPNTTTDKEEGQFKQDISLLRTEIQAKNCRTLGEYLSTISSPNCRRNRIRDGGHLRTDRQMYREELDLIWQQQALHHTKLTNELKEEIEEIIFYQRPLKLRADRVGKCSLESKNNRARLARLEVQQFRYLQDINNLQYLDHYKNRWVPLSSTEREKLTLLFESKATITFPQIRKTLDFDKKTEFNLEKGGNKKLKGNITITTIQSQYPDWDQLNQQQQQQLVEDLITIQKKSVLKRRLMQHWKIPAEFAIHLCMVELEPGHSNLSLKAINKLLPHLLQGNIYSDARKAAGYGYEAEELQVIDKLGLPPEIPNPIVQKGLHELRRLLNAIIAEYGKPDAIRIEMARDLEMNTKRYKSFVKQQNNNTKANDKATDEYRAVGSKNPHLQLRHYPSHNDKLKYRLWSDQEQRCAYSNQAINMTTLFTAEVEIDHILPFSESLDDSYMNKVVCFTRENRYKGQRTPIDAYGGDEEKWNQIAQSLSHWASKLKGKRNRFYMTADDVQQRDFISSQLNDTRYISKVALEYLEPLGVEITTCKGATTAQVRHWWGLNSLIGETNKKERTDHRHHAIDAVVIATIDRRFYNTITKLAKEMERSHTSINDLHLDPPWKQFRSDLEQQLQQTLIAHTPQRKLSGALHEET

SEQ ID NO: 9476 - protein, 638 aa, synthetic construct
  REGION 1..638: note = Synthetic
MSKIKKRKVLGLDLGSNSIGWALLEEVDKRPQSIIDLGSRIFNKAVEDKIPTPKNVSRRNARLTRRVLQRRSRRKRRMLHYMIALGLLPESLKNDHSPEITLNSIGDPYDLRAKALDDPLENFELGRVFLHFVQRRGFLSNRKTILGDLVDDPDVIAVLAEAEEEEDTSSDQAKEETVFKKQISVLRQTIADKKCRTLGEYLATIKAPKTRRNRTHAGGELRTDRQMYREELDLIWKKQADHHSILTEDVKEQIEEIIFFQRPLKLRSDRIGKCSLEKKKNRASIARLECQRFRYLQDISNMQLMMPDEHKWIKLTEEQREKLADLFESKGSISFTEVKKALDLKRNVKVNIEEGGNKKLKGNLTATSIRKVFPEWDNMDDSKQLALVEDLLTTNKKTTLKKRLTGHWNLSPQIAVELCMLEFEPGHSNLSLNAINKLLPFLEKGMLYNEARVEAGYGYEVKETEAEERLGMPPEITNPIVQKGLHELRRLVNAIISEYGKPDVIRIEMARDLEMNTRRYQEFTKQQNANTKANDEATEVFQDIGAKKRNLELGQFPSHTDKLKYRLWKDQKECCAYSGREIDISDLFTGTVEIDHILPYSMSLDDSYMNKVVCFAEENRNKGQRTPVDAFSDNPEKW

SEQ ID NO: 9477 - protein, 695 aa, synthetic construct
  REGION 1..695: note = Synthetic
RLEKFELGRVFLHFVQRRGFLSNRKTILGDLVDDPDVIAVLAEAEEEEDTSSEQAKEETVFKKQISVLRQTIADKKCRTLGEYLATIEAPQTRRNRTHSGGQLRTDRQMYREELDLIWKEQAKYLSTLTDEVKEQIENIIFFQRPLKLRSDRIGKCSLEPKKNRASIARLECQRFRYLQDISNLQYMLPNQDQYTKLNEKEKGTLVTLFESKGVVSFTDVKKALDLKRNVKINIEEGGNKKLKGNVTSTTIRKVFPSWDKLNSTERVALAEDMLTIQKKTTLKKRLTGHWGLSPEIAVELCMLEFEPGHMNLSLNAINKLLPFLEKGMLFNEARVEAGYGYEVEETEVTDRLGMPPEIANPIVQKGLHELRRLVNAIISEYGKPDVIRLEMARDLEMNTKRYQAFTKQQNANTKANNDATEAFQDVGSKNRHLELGQFPSHTDKLKYRLWIEQEKRCAYSNESINPTSLFTGEVEIDHILPYSQSLDDSYMNKVVCFSSENRQKGQRTPIDAFKTNPEKWEQIKQSVFRWGKNLKSKQNRFFMSEADVQKRDFISSQLNDTRYMTKVALDYLKQLGVDITTCKGITTSHVRHWWGLDSLLGEKNTEKDRTDHRHHAVDATVIATIDRGFYNKIVSTAKSLERENSSMNMNELKVNPPWGNLRSDLDKKLNNLIVSHSPNRKISGSLHEDSGVGFI

SEQ ID NO: 9478 - protein, 793 aa, synthetic construct
  REGION 1..793: note = Synthetic
MSNIKKRKVLGLDLGSNSIGWSLLEEVDKRPQSIIDLGCRIFTKAVEDKTPTPKNVSRRNARLTRRVLQRRSRRKQRMLHYLIILDLLPESLRNDHSPEITLNSIGDPYELRVKALDEALDKYELGRIFLHFVQRRGFLSNRKTILGDLVDDPDVIAVLAEAEEQEDTSSDQAKEETLFKKQISVLRQTIVNRKCRTLGEYLSTIKAPLTKRNRTHAGGALRTDRQMYREELDLIWKEQAKHFSILTGEVKEQIENIIFFQRPLKLRSDRIGKCSLEPKKNRASIARLECQRFRYLQDISNLQYMLPNQDQYTKLKGEEKESLVTLFESKGVVSFTDVKKVLGLKRNVKINIEEGGNKKLKGNLTSTIIGKVFPGWDKFGNTDRVALTEDILTIHKKTTLKKRLTRHWGLSPEIAVELCMLEFEPGHMNLSLNAINKLLPFLEKGMLFNEARVKAGYGYEVEETEVKERLGMPPEIANPIVQKGLHELRRLVNAIISEYGKPDVIRIEMARDLEMNTKRYQAFTKQQNANTKANNDATEAFQDISSQNRHLELGQFPSHSDKLKYRLWIEQGKRCAYSNQSINLTSLFTGEVEIDHILPYSQSLDDSYMNKVVCFSSENRQKGQRTPVDAFVSSPEKWEQIKQSVFKWGKNLKSKQDRFFMSDFEVQKRDFISSQLNDTRYMTKVALDYLKQLGADITTCKGVTTAQVRHWWGLNNLLGETDKKERTDHRHHAVDATVIATIDRGFYNKIVSTAKSLERENSSMNMNDLKVNPPWEDLRSDLDKKLNNLIVSH

SEQ ID NO: 9479 - protein, 772 aa, synthetic construct
  REGION 1..772: note = Synthetic
MSNIKKRKVLGLDLGSNSIGWSLLEEVDKRPQSIIDLGCRIFTKAVEDKTPTPKNVSRRNARLTRRVLQRRSRRKQRMLHYLIILDLLPESLRNDHSPEITLNSIGDPYELRVKALDEALDKYELGRIFLHFVQRRGFLSNRKTILGDLVDDPDVIAVLAEAEEQEDTSSDQAKEETLFKKQISVLRQTIVNRKCRTLGEYLSTIKAPLTKRNRTHAGGALRTDRQMYREELDLIWKEQAKHFSILTGEVKEQIENIIFFQRPLKLRSDRIGKCSLEPKKNRASIARLECQRFRYLQDISNLQYMLPNQDQYTKLKGEEKESLVTLFESKGVVSFTDVKKVLGLKRNVKINIEEGGNKKLKGNLTSTIIGKVFPGWDKFGNTDRVALTEDILTIHKKTTLKKRLTGHWGLSPEIAVELCMLEFEPGHMNLSLNAINKLLPFLEKGMLFNEARVKAGYGYEVEETELKERLGMPPEIANPIVQKGLHELRRLVNAIISEYGKPDVIRIEMARDLEMNTKRYQAFTKQQNANTKANNEATEAFQDISSQNRHLELGQFPSHSDKLKYRLWIEQGKRCAYSNQSINLTSLFTGEVEIDHILPYSQSLDDSYMNKVVCFSSENRQKGQRTPVDAFVSSPEKWEQIKQSVFKWGKNLKSKQDRFFMSDFEVQKRDFISSQLNDTRYMTKVALDYLKQLGADITTCKGVTTAQVRHWWGLNNLLGETDKKERTDHRHHAVDATVIATIDRGFYNKIVSTAKSLERENSSMNMNDLKVN

SEQ ID NO: 9480 - protein, 826 aa, synthetic construct
  REGION 1..826: note = Synthetic
MSNTKIKKVLGLDLGSNSIGWALLETNDGRPHKIIDLGSRIFNKAVEDKTPTPKNVTRRAARLTRRVLQRRSRRKIRMLNYLISLDLLPKSLRDNPAPEIILNTLGDPYELRAEALDKPLEKHQLGRVFLHFVQRRGFLSNRKTILGDLVDDPDVTAVLAEAESAEDTSTEQAKEETVFKKQISVLRQTISETPAPQDSESENKKCRTLGEYLFTIKAPLTRRNRTHSGGELRTDRQMYRDELELIWKKQATHHTVLNEDVKEQIEDIIFAQRPIKLRSDRIGKCSLEPTKNRISIARLEYQCFRYLQDVNNLEYMLPCDNHWTKLNEDQRQKLILLFESKSSVSFTEVKKTLGLKRNVKINLEEGGNKKFKGNVTASAFRTVIPEWDNYDSPKQLSFVEDMLSIQKKSTLKKRLTGHWNLNPETAVQLCMLEFEPGHGNLSLKAINKLLPFLEQGMLFNEARVEAGYGYEKENTEINERLGMPPGTSNPIVNKGLHELRRLVNAIIAEYGKPDIIRIEMARDLEMNTKRYKANEAQQTANTKANEKATEAFQEIGSQNPQLGLRHYPSHTDKLKYRLWFDQEKRCAYSNQSINLTSLFTGEVEIDHILPYSQSLDDSYMNKVVCLTSENRNKGQRTPVDAFSTKPEKWVQIKQSIFKWGKKLKSKQNRFFMSAADVQKRDFISSQLNDTRYMSRVALDYLKQLGADITTCKGITTSHVRHWWGLNNLLGETDKKDRTDHRHHAIDAVVIATIDRGFYNKIVSTAKSFEESNSALSMNDLVVNPPWPELRNDLDKKLGTVVVAHAPNRKLSGALHEDTGAGFIKGH

SEQ ID NO: 9481 - protein, 797 aa, synthetic construct
  REGION 1..797: note = Synthetic
MSNTKIKKVLGLDLGSNSIGWALLETNDGRPHKIIDLGSRIFNKAVEDKTPTPKNVTRRAARLTRRVLQRRSRRKIRMLNYLISLDLLPKSLRDNPAPEIILNTLGDPYELRAEALDKPLEKHQLGRVFLHFVQRRGFLSNRKTILGDLVDDPDVTAVLAEAESAEDTSTEQAKEETVFKKQISVLRQTISETPAPQDSESENKKCRTLGEYLFTIKAPLTRRNRTHSGGELRTDRQMYRDELELIWKKQATHHTVLNEDVKEQIEDIIFAQRPIKLRSDRIGKCSLEPTKNRISIARLEYQCFRYLQDVNNLEYMLPCDNHWTKLNEDQRQKLILLFESKSSVSFTEVKKTLDLKRNVKINLEEGGTKKFKANVTASAIRTVIPEWDQFDSSQQLSFVEDMLSIQKKSTLKKRLTGHWNLNPETAVQLCMLEFEPGHGNLSLKAINKLLPFLEQGMLFNEARVEAGYGYEKENTEINERLGMPPGTSNPIVNKGLHELRRLVNAIIAEYGKPDIIRIEMARDLEMNTKRYKANEAQQTANTKANEKATEAFQEIGSQNPQLGLRHYPSHTDKLKYRLWFDQEKRCAYSNQSINLTSLFSGDIEIDHILPYSQSLDDSYMNKVVCFANENRNKGQRTPVDAFKTNPEKWEQIKQSVFKWGKNLKSKQNRFFMFDADVQKRDFISTQLNDTRYISRVALDYLKQLGADITTCKGITTSHVRHWWGLNNLLGDTDKKERTDHRHHAIDAAVITIIDRGFYNKIVSTAKQLERGNSSLKMNDLKVAPPWVDFRNDLDKKL

SEQ ID NO: 9482 - protein, 747 aa, synthetic construct
  REGION 1..747: note = Synthetic
MSNTKIKKILGLDLGSNSIGWALLENKDGRPQKIIDLGSRIFTKAVEDKTPTPKNVNRRESRLTRRVLQRRSRRKQRMLNYLISLDLLPKSLRDNPAPEIILNTLGDPYELRAVALDKPLEKHQLGRVFLHFVQRRGFLSNRKTILGDLVDDPDVTAVLAEAESEEDTSTEQAKEETVFKKQISVLRQTILETLAPQNSKSKDNKCRTLGEYLYTIKAPLTRRNRTHSGGELRTDRQMYRDELDLIWKQQATHHTVLNEDVKEQIEEIIFLQRPLKLRSDRIGKCSLEPKKNRISIARLEYQCFRYLQDVNNLEFMLPSENHWTKLNEDERQKLILLFESKSSVSFTEVKKTLDLNRNVKINLEEGGNKKFKGNVTASAIRKVIPEWDNFDSPQQLSFVEDMLSIQKKSTLKKRLTGHWNLNPETAVQLCMLEFEPGHGNLSLKAINKLLPYLERGMLFNEARVEAGYGYETEQTEAKERLGMPPETSNPIVNKGLHELRRLVNAIISEYGKPDVIRIEMARDLEMNTKRYKANETQQTANTKANEKATEAFQEIGSKNPQLGLRHYPSHTDKLKYRLWLDQEKRCAYSNQCINLTSLFTGEVEIDHILPYSQSLDDSFMNKVVCLTSENRNKGQRTPVDAFSTNPEKWEQIKQAIFKWGKKLKSKQNRFFMSAAEVQKRDFISSQLNDTRYMSRVALDYLKQLGADITTCKGITTSHVRHWWGLNNLLGETDKKDRTDHRHHAIDA

SEQ ID NO: 9483 - protein, 718 aa, synthetic construct
  REGION 1..718: note = Synthetic
MSNTKIKKILGLDLGSNSIGWALLENKDGRPQKIIDLGSRIFTKAVEDKTPTPKNVNRRESRLTRRVLQRRSRRKQRMLNYLISLDLLPKSLRDNPAPEIILNTLGDPYELRAVALDKPLEKHQLGRVFLHFVQRRGFLSNRKTILGDLVDDPDVTAVLAEAESEEDTSTEQAKEETVFKKQISVLRQTILETLAPQNSKSKDNKCRTLGEYLYTIKAPLTRRNRTHSGGELRTDRQMYRDELDLIWKQQATHHTVLNEDVKEQIEEIIFLQRPLKLRSDRIGKCSLEPKKNRISIARLEYQCFRYLQDVNNLEFMLPSENHWTKLNEDERQKLILLFESKSSVSFTEVKKTLDLKRNVKINLEEGGNKKFKGNVTASAIRKVIPEWDNFDSPQQLSFVEDMLSIQKKSTLKKRLTGHWNLNPETAVQLCMLEFEPGHGNLSLKAINKLLPYLERGMLFNEARVEAGYGYETEQTEAKERLGTPPETSNPIVNKGLHELRRLVNAIISEYGKPDVIRIEMARDLEMNTKRYKANETQQTANTKANEKATEAFQEIGSKNPQLGLRHYPSHTDKLKYRLWLDQEKRCAYSNQCINLTSLFTGEVEIDHILPYSQSLDDSFMNKVVCLTSENRNKGQRTPVDAFSTNPEKWEQIKQAIFKWGKKLKSKQNRFFMSAAEVQKRDFISSQLNDTRYMSRVALDYLKQLGADITTCKGITTSH

SEQ ID NO: 9484 - protein, 702 aa, synthetic construct
  REGION 1..702: note = Synthetic
MSNTKIKKILGLDLGSNSIGWALLENKDGRPQKIIDLGSRIFTKAVEDKTPTPKNVNRRESRLTRRVLQRRSRRKQRMLNYLISLDLLPKSLRDNPAPEIILNTLGDPYELRAVALDKPLEKHQLGRVFLHFVQRRGFLSNRKTILGDLVDDPDVTAVLAEAESEEDTSTEQAKEETVFKKQISVLRQTILETLAPQNSKSKDNKCRTLGEYLYTIKAPLTRRNRTHSGGELRTDRQMYRDELDLIWKQQATHHTVLNEDVKEQIEEIIFLQRPLKLRSDRIGKCSLEPKKNRISIARLEYQCFRYLQDVNNLEFMLPSENHWTKLNEDERQKLILLFESKSSVSFTEVKKTLDLKRNVKINLEEGGNKKFKGNVTASAIRKVIPEWDNFDSPQQLSFVEDMLSIQKKSTLKKRLTGHWNLNPETAVQLCMLEFEPGHGNLSLKAINKLLPYLERGMLFNEARVEAGYGYETEQTEAKERLGMPPETSNPIVNKGLHELRRLVNAIISEYGKPDVIRIEMARDLEMNTKRYKANETQQTANTKANEKATEAFQEIGSKNPQLGLRHYPSHTDKLKYRLWLDQEKRCAYSNQCINLTSLFTGEVEIDHILPYSQSLDDSFMNKVVCLTSENRNKGQRTPVDAFSTNPEKWEQIKQAIFKWGKKLKSKQNRFFMSAAEVQKRDFISSQLNDTRYMSRVALDYLK

SEQ ID NO: 9485 - protein, 780 aa, synthetic construct
  REGION 1..780: note = Synthetic
MSNTKIKKILGLDLGSNSIGWALLENKDGRPQKIIDLGSRIFTKAVEDKTPTPKNVNRRESRLTRRVLQRRSRRKQRMLNYLISLDLLPKSLRDNPAPEIILNTLGDPYELRAVALDKPLEKHQLGRVFLHFVQRRGFLSNRKTILGDLVDDPDVTAVLAEAESEEDTSTEQAKEETVFKKQISVLRQTILETLAPQNSKSKDNKCRTLGEYLYTIKAPLTRRNRTHSGGELRTDRQMYREELDLIWKQQATHHTVLNEDVKEQIEEIIFLQRPLKLRSDRIGKCSLEPKKNRISIARLEYQCFRYLQDVNNLEFMLPSENHWTKLNEDERQKLILLFESKSSVSFTEVKKTLDLKRNVKINLEEGGNKKFKGNVTASAIRKVIPEWDNFDSPQQLSFVEDMLSIQKKSTLKKRLTGHWNLNPETAVQLCMLEFEPGHGNLSLKAINKLLPYLERGMLFNEARVEAGYGYETEQTEAKERLGMPPETSNPIVNKGLHELRRLVNAIISEYGKPDVIRIEMARDLEMNTKRYKANETQQTANTKANEKATEAFQEIGSKNPQLGLRHYPSHTDKLKYRLWLDQEKRCAYSNQCINLTSLFTGEVEIDHILPYSQSLDDSFMNKVVCLTSENRNKGQRTPVDAFSTNPEKWEQIKQAIFKWGKKLKSKQNRFFMSAAEVQKRDFISSQLNDTRYMSRVALDYLKQLGADITTCKGITTSHVRHWWGLNNLLGETDKKDRTDHRHHAIDAVVIATIDRGFYNKIVSTAKSFEENNSALSMNDL

SEQ ID NO: 9486 - protein, 742 aa, synthetic construct
  REGION 1..742: note = Synthetic
CRTLGEYLYTIKAPLTRRNRTHSGGELRTDRQMYRDELDLIWKQQATHHTVLNEDVKEQIEEIIFLQRPLKLRSDRIGKCSLEPKKNRISIARLEYQCFRYLQDVNNLEFMLPSENHWTKLNEDERQKLILLFESKSSVSFTEVKKTLDLKRNVKINLEEGGNKKFKGNVTASAIRKVIPEWDNFDSPQQLSFVEDMLSIQKKSTLKKRLTGHWNLNPETAVQLCMLEFEPGHGNLSLKAINKLLPYLERGMLFNEARVEAGYGYETEQTEAKERLGMPPETSNPIVNKGLHELRRLVNAIISEYGKPDVIRIEMARDLEMNTKRYKANETQQTANTKANEKATEAFQEIGSKNPQLGLRHYPSHTDKLKYRLWLDQEKRCAYSNQCINLTSLFTGEVEIDHILPYSQSLDDSFMNKVVCLTSENRNKGQRTPVDAFSTNPEKWEQIKQAIFKWGKKLKSKQNRFFMSAAEVQKRDFISSQLNDTRYMSRVALDYLKQLGADITTCKGITTSHVRHWWGLNNLLGETDKKDRTDHRHHAIDAVVIATIDRGFYNKIVSTAKSFEENNSALSMNDLVVNPPWSELRNDLDKKLGTVIVAHAPNRKLSGALHEDTGAGFIKGQGTVYRKLLNSDMTVKRAEEIIDPHVRALVIEHLSQFENDPKKAFAEGVKVFHKDGKTLIKRVRVLQSKEYKTLEKLEKSKFGVRDHQGKLYKWFAYGNNHHVEIVRNRNTRKVRGIFVTMM

SEQ ID NO: 9487 - protein, 736 aa, synthetic construct
  REGION 1..736: note = Synthetic
VQRRGFLSNRKTILGDLVDDPDVTAVLAEAESEEDTSTEQAKEETVFKKQISVLRQTILETLAPQNSKSKDNKCRTLGEYLYTIKAPLTRRNRTHSGGELRTDRQMYRDELDLIWKQQATHHTVLNEDVKEQIEEIIFLQRPLKLRSDRIGKCSLEPKKNRISIARLEYQCFRYLQDVNNLEFMLPSENHWTKLNEDERQKLILLFESKSSVSFTEVKKTLDLKRNVKINLEEGGNKKFKGNVTASAIRKVIPEWDNFDSPQQLSFVEDMLSIQKKSTLKKRLTGHWNLNPETAVQLCMLEFEPGHGNLSLKAINKLLPYLERGMLFNEARVEAGYGYETEQTEAKERLGMPPETSNPIVNKGLHELRRLVNAIISEYGKPDVIRIEMARDLEMNTKRYKANETQQTANTKANEKATEAFQEIGSKNPQLGLRHYPSHTDKLKYRLWLDQEKRCAYSNQCINLTSLFTGEVEIDHILPYSQSLDDSFMNKVVCLTSENRNKGQRTPVDAFSTNPEKWEQIKQAIFKWGKKLKSKQNRFFMSAAEVQKRDFISSQLNDTRYMSRVALDYLKQLGADITTCKGITTSHVRHWWGLNNLLGETDKKDRTDHRHHAIDAVVIATIDRGFYNKIVSTAKSFEENNSALSMNDLVVNPPWSELRNDLDKKLGTVIVAHAPNRKLSGALHEDTGAGFIKGQGTVYRKLLNSDMTVKRAEEIIDPHVRALVIEHLSQFENDPKK

SEQ ID NO: 9488 - protein, 1035 aa, synthetic construct; identical to SEQ ID NO: 5008
  REGION 1..1035: note = Synthetic

SEQ ID NO: 9489 - protein, 819 aa, synthetic construct
  REGION 1..819: note = Synthetic
LVGYTKTILHGGREMHKKVLGLDLGSNSIGWAIVEEAEGRPVRILDMGCRIFSKAVEDKTPTPKNVKRRESRLARRVIQRRARRKKRMLSYLVSLGLLPEELKGHPQPEIILNRLGNPYLLRAKALDAPLTAQELGRVLLHLVQRRGFLSNRKTLLGDMIDDPDVMAILDELDAQGEQQSGEEGEFKQDIARLNERIRESGSRTLGEYLSRIEAPCTKRNRRRDGGHMRTDRQMYRDELDLIWEKQKTYHPILTDKVKEQIETIIFRQRPVRFKAGRVGNCSLEPRRRRAMVAWLEYQRFRYLQDINNLEFFDVYRERWVRLTPDDRERLGMLFEQQESVTFPQIRKRLGLDKTAEFNLERGNKKLKGNITACRLRNSVPEWDDMTAETQHRLVEDLLTIGKKSVLKKRLMEHWGFDLHRAVDLCLLELEPGHGNLSLRAVRKLLPHLENGAVYSDARLLAGYGYAQDANDVVFRLGLPPDVPNPIVSKALHELRRVINALIAEYGKPDVIRIEMARDLEMNTARYREYERRQRANARANEEAVEKYRLVAERNPHLRLSRYPSKDDKIRYRLWKDQGEVCVYSGRTIPLATLFSAEIDVDHVIPFSESLDDSYMNKVVCYAEENRYKGQRTPVDAFAANQEKWDQITQRVARWGKSLKNKRLRFFMTAEDVRQRGFASAQLNDTRYISRLAHEYLKQLGADITVTRGVMTAWLRHQWDLNSLIGMDRLNKDRVDHRHHAIDAVVTACIGRGFYQSLVRAAKEMERRRPGFRIRDIHMDPPWSSFRKDMGALLEDMVISHASKRKISGELHEATGVGFI

SEQ ID NO: 9490 - protein, 1033 aa, synthetic construct
  REGION 1..1033: note = Synthetic
MGKKILGLDLGTNSIGWALLEETNKKPSVIIDLGVRIFQKSVEEKTPTPKNVKRRDARLARRVIQRRARRKQRMLNYLVKLDLLPKELQGHAQPEIILNRLGNPYRLRAMALDNPLKNHELGRVILHLVQRRGFLSSRKTLLGDMVDDPDVKAVLDKLEDTGESLSERAKEETLFKKDINVLRQTIKTNGHRTLGEYLASLDHHDCKRNRSREGGHLRTDRQMYHDELDLIWEMQAKFNEILTDEVKEQIEQIIFYQRPLKLSSDSVGKCSLESSRNRARMARLECQRFRYLQDINNLKYFDYYTDTWKELNQVDREKLVKLFENKANPTFKTDIRKALGLDKGTEFNLDTDNKKLKGNITACEIRSIFLEWDGLEKVKQLSLVEDLLTIKKKSVLKKRLMNHWRFDAKTAVNLCMLEFEPGHANLSIKAITKLLSYLEHGQIYSDARVSAGYNYEIEKADIVEKLGSPPEIANPIVNKALNEVRRLVNAVIKEYGKPDAIRIEMARDLEMNTKKYKAYTKQQLANTKANKEAGEKYQDMGKANPHLMLSKYPSRADKIKYRLWKNQDERCAYSGKNISLATLFSAEIDIDHILPYSQSLDDSYMNKVVCFAGENRYKGQRTPIDTWGANEEKWNQISQAVSRWSKKLTAKKNRFFITSDELQTRDFISSQLNDTRYISKVTLDYVKQLGADVSVSKGTTTSWLRHQWDLNSLLGETNEKERADHRHHAIDALVVSCVGRQFYKNLVGLATDLEKSSSQLQMRDLHIDPPWPTLRDNLNDKLQNIIVSHASRKKLSGALHEETGAGFIEGKGTVYRVDLNSEFKITQINKIIDDEVRHIVQQHLEKYENKPKEAFADDVTVYHKDVKTPIKRVRIIQAKTSRDKLIKNKFGARNKEGHVFKWMPYGNTHHVEIIKTKKTGIYSGVFVTTMEASRRARGVGVKKQPIIKTNHGDDKEFALALHINDIVSLKNGDTRKYYRVQLLEADSGRIKLRLHTAANIDNKNEEIRISIKKLMTMDLSLHAVNSIGMIRND

SEQ ID NO: 9491 - protein, 1033 aa, synthetic construct
  REGION 1..1033: note = Synthetic
MGKKILGLDLGTNSIGWALLEETNKKPSVIIDLGVRIFQKSVEEKTPTPKNVKRRDARLARRVIQRRARRKQRMLNYLVKLDLLPKELQGHAQPEIILNRLGNPYRLRAMALDNPLKNHELGRVILHLVQRRGFLSSRKTLLGDMVDDPDVKAVLDKLEDTGESLSERAKEETLFKKDINVLRQTIKTNGHRTLGEYLASLDHHDCKRNRSREGGHLRTDRQMYHDELDLIWEMQAKFNEILTDEVKEQIEQIIFYQRPLKLSSDSVGKCSLESSRNRARMARLECQRFRYLQDINNLKYFDYYTDTWKELNQVDREKLVKLFENKANPTFKTDIRKALGLDKGTEFNLDTDNKKLKGNITACEIRSIFLEWDGLEKVKQLSLVEDLLTIKKKSVLKKRLMNHWRFDAKTAVNLCMLEFEPGHANLSIKAITKLLSYLEHGQIYSDARVSAGYNYEIEKADIVEKLGSPPEIANPIVNKALNEVRRLVNAVIKEYGKPDAIRIEMARDLEMNTKKYKAYTKQQLANTKANKEAGEKYQDMGKANPHLMLSKYPSRADKIKYRLWKNQDERCAYSGKNISLATLFSAEIDIDHILPYSQSLDDSYMNKVVCFAGENRYKGQRTPIDTWGANEEKWNQISQAVSRWSKKLTAKKNRFFITSDELQTRDFISSQLNDTRYISKVTLDYVKQLGADVSVSKGTTTSWLRHQWDLNSLLGETNEKERADHRHHAIDALVVSCVGRQFYKNLVGLATDLEKSSSQLQMRDLHIDPPWPTLRDNLNDKLQNIIVSHASRKKLSGALHEETGAGFIEGKGTVYRVDLNSEFKITQINKIIDDEVRHIVQQHLEKYENKPKEAFADDVTVYHKDVKTPIKRVRIIQAKTSRDKLIKNKFGARNKEGHVFKWMPYGNTHHVEIIKTKKTGIYSGVFVTTMEASRRARGVGVKKQPIIKINHGDDKEFALALHINDIVSLKNGDTRKYYRVQLLEADSGRIKLRLHTAANIDNKNEEIRISIKKLMTMDLSLHAVNSIGMIRND

SEQ ID NO: 9492 - protein, 1035 aa, synthetic construct; identical to SEQ ID NO: 5004
  REGION 1..1035: note = Synthetic

SEQ ID NO: 9493 - protein, 1010 aa, synthetic construct
  REGION 1..1010: note = Synthetic
NDKKPTALCNLGVRIFQKAVEEKTPTPKNQKRRDKRLARRVIQRRARRKQRMLNYLVKLGLLPEEIQGHAQPEIILNDLGAPYQLRARALDKKLENYELGRILLHLVQRRGFLSNRKTLLGDMIDDPDVIAILAEDDTAEDSSSERAKEETAFKKDISQLRKTIEENGFRTLGEYLASLGHHDCKRNRSREGGHLKTDRRMYREELDLIWKKQSEFNNQLTDELKEQLEEIIFYQRPLKLRSDRVGKCSLEPGRKRAHVARLEYQQFRYLQDINNLKYFDHYKEQWQDLTQDDREKLIVLFESKAHPTFKTDVRNALGLPKGTEFNLDTDNKKLKGNITACEIRQVLPAWDEIPTEKQKPLMEDLLTINKKSVLKNRLIQFWKFDIETAINLCLIEFENDHANISLKAINNLLPHLRQGKTYSDARVAAGYGYETKEIKTKDNLGMPPEIANPIVNKALHEVRRVINAIIKEHGKPDIIRIEMARDLEMNTKKYKAFIKQQSANTKANDEAVQKYQEMGRKNPQLKLSKYPSRADKIRYRLWKDQDGRCAYSNKQIDLTTLFSSEVDIDHIIPYSQSLDDSYMNKVVCYAGENRLKGQRTPVDTWSGNEERWLQITQSVNRWARNLSAKKNRFYMKQEDVMERDFISNQLNDTRYISKIALDYVKQLGVDVSVSKGQTTAWLRHMWGLNSLIGETDKKERTDHRHHAIDAVVVGCVGRTFYKNLTGLAKELEKSRSGATIKDMNIDPPWDNLRNDLNDRLNTMIVSHANQRGISGALHEETGAGYIEGIGTVYRTDLNGEFKTTQVKKIIDDTVREIVEAHLLKHNNNPREAFAEGTMVYHRDGKTPIKRVRIVQAKTTPDKLKKSKFGARDITGKVFKWLPYGNMHHVELIKHRETGKYSGVFVTMMEAARRVRGIGEKKCPPINKNHGKEYEFVMALHINDTVSVMVNGCKRYFRIQMLDSPNKRVKLRNHAASTLSNDQDTFPDRELTIPALMEKELELCNLNCIGR

SEQ ID NO: 9494 - protein, 1032 aa, synthetic construct
  REGION 1..1032: note = Synthetic
MSKLVLGLDIGSNSIGWALVELGDEGKPIGIVGLGSRIFTKAVEEKTPTPKNMKRRMARLTRRVLHRRSQRKQRMMNYLVKLALLPAALQGDTRPEVILNSLGDPYTLRAKALDAELTPFELGRAILHLVQRRGFLSSRKTLLGDMADDPDVQEVLNELEGDDDVSTEAAKEETAFKHDISLLRNRIRESGSRTLGEYLSTFTQHESKRNRIRDGGHLRTDRQMYKEELSLILARQQQFHATIDEDVADELASIIFFQRPLKLKSDRIGKCSLEKSRKRIRLARPEYQKFRYLQDINNLAYFDQWQERNINLSEEQRAKLVVLFESSNAVTFPKIRKELGLDKSHEFNLENGGKKLKGNITACTIREVLPQWDDLEVCNQTDLMEDLLTIQKKSVLRQRLINFWKLSNEQAVQLCLIEFEPSHGALSLKAINKLLPYLEQGQIYSTARISAGYGYEKEEIETIESLGQPPEIPNPIVSRALHELRRLTNAIIKEYGKPDAIRVEMARDLEMNTKRYKAAEKQQKDNEKKNDEAVDKYREMALSNSHLRLSKYPSRQDKIKYRLWQDQDQRCAYSAKSISLSTLFSAEIDVDHVLPYSQSLDDSYMNKVVCYAAENRYKGQRTPVDAYGKDEKKWNQIVQSVNRWGRSLKSKRERFFQTENDLQTKDFVSSQLNDTRYITRVALDYLQPLGTEITTSKGAITAWLRHQWGLNDLIGNSREKDRVDHRHHAIDAAVVACVDRFFYNNLVSAARQHERSHPELQIKDLAIDTPWAAMRTDLGAALGEVIISRSPQRKLTGSLHEETGVGFIEGVGNVGRKSLDAEFKQVDKIYDAGVKSIVQRHLEKYGNKEKEAFAPGVTVFHKDGKTPIKRVRVVQSVTTRERLEGSKFGARNKEGVVFKWLAYGNGHHVEIVRDLKTNKVKGYFVNTMKASNRARGVSQAKQAVVKIDHGTGFEFLMALFIDDLVSFELEGKKRFYRVQTLDAAGNRMMFRSHIAASLSDKSEGLLLTINDDLLVRYKLKRHRINVLGHILG

SEQ ID NO: 9495 - protein, 1026 aa, synthetic construct
  REGION 1..1026: note = Synthetic
MSKKILGLDIGSNSIGWALLEGEANKPSKVIDLGSRIFTKAVEEKIPTPKNVKRRDSRLARRVIQRRARRKLRMLNYLVKLKLLPQELSGHTQLEVILNKLGDPYKLRKKSLDSALKPHEMGRVLLHLVQRRGFLSNRKILLGDMADDPDVLDVLEELEGQENTSTDNAKEETAFKNDISELRSNIQKTGSRTLGEYLAGLDEHTSKRNRTHDGGHLRTDRKMYFDELNKIWEAQEAFHDQLTIEVKKQIEQIIFYQRPLRLRSDRIGKCSLEPARKRSRLGRLEYQRFRYLQDINHLTYFDPYQEKNISLTSDQREVLITYFEDKANPTFPQLRKLLGLDKSYSFNLETENKKLKGNITRIKIKSVYSEWDDLTKEKQHELVEDLLTINKKSVLKSRLINYWKLPSITAIDLCLLEFEPGHSNLSLKAMRKLLPFLEEGAIFSSAREKAGYGYEKNEIIAVDKLGKPPETSNPIVNKGLQEVRRVVNAIIKEYGKPDIIRVETARDLEMNTKRYKKNQQQQNKNTKANDAAQEEFEKIGKTNPHLKLRTYASRQDKLKYRLWEDQDRRCAYSGKGISLSILFSGEIEIDHILPYSQSLDDSYMNKVVCYAAENQKKGQATPRDAFSDDEGKWNQITQAISRWDKSIQSKKNRFYQRASDVEERDFISSQLNDTRYITTVALSYLESLGSDITSCKGQITAWLRHQWGLNSLIGTSDKKERIDHRHHAIDAVVVANVDRSFYKILVSTAKQHEKSHPELQTKDLHIDPPWETFRDDVQKCLEEVIISHAPLNKLNGALHEETGVGFIEGKGTVYKKILDSNFTQVSKIYDIPVQQIIQKHLDKHGNDPKKAFAEGFKVFHKDGKTLIKRVRILQAKTTLEELEKSKFGARDKEGKVFKWLAFGNNHHVEIIKNNKTGKYSGEFVTMMEASKRVKGIGIKKQPIIKKDHDASEFIMSLAKNDLVRLEGAPGIYYRVQKMRNSGQLTLRLHSASTLDIKEEKILMNISPLINKHSMKKVRINGIGKII

SEQ ID NO: 9496 - protein, 1031 aa, synthetic construct
  REGION 1..1031: note = Synthetic
MSKKILGLDIGSNSIGWALLESNENAPSKIIDLGSRIFTKAVEDKTPTPKNVKRRDSRLARRVIQRRARRKSRMLNYLVKLKLLPQELAGHTQPEIILNELGDPYQLRKKSLDSPLKPHELGRIFLHLVQRRGFLSNRKTLLGDMADDPDVLDVLESLEGDEDNSTDRAKEETAFKKDISELRKYIEDTKSRTLGEYLAGLDQHTSKRNRTHDGGHLRTDRKMYFDELNKIWEVQESFHDQLTSEVKEQIDQIIFYQRPLKLRSDRIGKCSLEPTRKRARMGRLEFQKSRYLQDINNLTYFDPYQEKHTPLTSDQKEILISYFEEKATPTFAQARKLLGFGRDKTYSFNLETENKKLKGNVTGTKIRSIFPQWDDLSEDKQYELVEDLLTINKKSVLKSRLINHWKLPIATTVDLCLLEFEPGHGNLSVKAIRKLLPFLETGSIYSDAREQAGYGYEKENIIETDTLGKPPETSNPIVNKGLQEVRRVVNAVIKEYGKPDIIRVEMARDLEMNTKRYKKQQQQQNKNTKANTEAEQEFEKTGKANPHLKLRSYPSRQDKLKYRLWKDQDCRCAYSGKGIGISTLFSAEIEIDHILPYSQSLDDSYMNKVVCYAAENQRKGQATPKDAFGDNEEKWNQITQAVSKWGPSLSSKTNRFYQRASDVQVRDFISSQLNDTRYITTVALGYLETLGSDITTCKGQITAWLRHQWGLNSLIGTSDKKERIDHRHHAIDAVVVANVDRRFYNTLVSVAKQHERKHPELQTKDLHIDPPWEDFKKDVDDLLNEVVISHAAQNKLNGALHEETGVGFINGRGTVTRKLLAPDFTQVSKIYDESVRKLVQLHLDKHENDPKQAFAEGFRLVHKDGKTPIKRVRILKSKTTLDKLEKSKFGVRNKEGEVFKWLAYGNYHHVEIIKNNKTEKYSGIFVTMMEANCRAKGIGIAKQPIVKTEHGDGYAFVMSLAINDLVQINGSESKYYRVQKMIETGSLLLRAHTASTIDSKEESLSKAIPSLMTEHNMIKIHVNSIGKIMKC

SEQ ID NO: 9497 - protein, 1031 aa, synthetic construct
  REGION 1..1031: note = Synthetic
MSKKILGLDIGSNSIGWALLEGDDGKASNIVDLGSRIFTKAVEDKTPTPKNVKRRDSRLTRRVLQRRARRKQRMLNYLVKLKLLPQELSGHTQPEVILNDLGDPYQLRKRGLDSPLSANEMGRVLLHLVQRRGFLSNRKTLLGDMADDPDVLDALEELEGEGDTSTEAAKEETAFKKDISEFRNQIEASGSRTLGEYLAGLEKHTSKRNRFHDGGHLRTDRKMYFDELNKIWEVQEAFHEQLNSEVKKQIDQIIFHQRPLKLRSDRVGKCSLEPTRKRSRMGRLEYQRFRYLQDINNLTYFDPYQEENVPLTSDQRKIIVAHFEDKANPTFAQLRTLLGFGRDKAYSFNLETDNKKLKGNTTRIKVKSVCSQWAEFSEEKQYAMIEDLLTINKKSVLKSRLINHWNLPIGTAIDLCLTEFEPGHGNLSVKAINKLLPFLEDGCIYSDAREKAGYGYEKREIVAEDKLGTPPMTSNPIVNKGLQEVRRVVNAVIKEYGKPDIIRIEMARDLEMNTKRYKAQQKQQNQNTKANEDAQGEFEKIGKANPHLKLRTYASRQDKLKYRLWRDQDTRCAYSGKVISLSILFSGEIEIDHILPYSQSLDDSYMNKVVCYAAENQKKGQQTPRDAFSHDEEKWNQIVQAVSRWDKSIQSKKNRFYQRENDVQARDFISSQLNDTRYITSVALDYLATLGCDITTCKGQITAWLRHQWGLNSLIGVSDKKERIDHRHHAIDAVVVATVDRGFYNTLVGVAKQHERNHPELQTKDLHIDPPWDSLRDDMDAKLAEVVIAHDAQNKLNGALHEETGVGYVHGKGAVTRKTLGPDFSQVSKIYDEGVRELVQQHLDKNGNDPKKAFTEGFGLFHKDGKTRIKRVRILHSSTTLEKLEKGKFGARNTNGQVFKWLAYGNYHHVEIIKNKKTDKHSGKFVTMMEANHRAKGIGQEKQAIVKIDHGDDNEFVTSLVINDLVRLENAKGVYYRVQKMQANGGIHLRLHAASTLEFKEELVSMSIGSLFEKHKLEKVLVNSIGKLSGC

SEQ ID NO: 9498 - protein, 683 aa, synthetic construct
  REGION 1..683: note = Synthetic
LVKLKLLPQELSGHTQPEIILNELGDPYQLRKKGLDSALSAYEMGRVLLHLVQRRGFLSNRKTLLGDMADDPDVLDVLEELEGEGNTSTDAEKEETAFKKDISELRNKIEESGSRTLGEYLAGVGKHISTRNRSHDGGHLRTDRKMYFDELNKIWEVQEGFHDQINSDVKEQIDQIIFYQRPLKLSSDRIGKCSLEHTKKRARMGRLEYQRFRYLQDINNLTYFDPFQEKNVRLTSGQRKIIVAHFEDKANPTFAQLRTLLGFGEDKTYSFNLETDNKKLKGNITRIKIKNVCPQWNEFTEEKQYGLVEDLLTINKKSVLKNRLINHWHLPLDVTIDLCLLEFEPGHGNLSVKAINKLLPFLEDGYIYSDAREKAGYGYEREEIIPENKLGKPPSTSNPIVNKGLQEVRRVVNAIIKEYGKPDIIRIEMARDLETNTKRYKAQQRQQNQNTKANEDAQGEFEKIGKANPHLKLRTYASRQDKLKYRLWKDQDTRCAYSGKVISLSILFSGEIEIDHILPYSQSLDDSYMNKVVCYASENQKKGQQTPRDAFGPDEEKWNQISQAVSRWDKSIQSKKNRFYQRAEDVQARDFISSQLNDTRYITRVALDYLATLGSDITTCKGQITAWLRHQWGLNSLIGVSDKKERIDHRHHAIDAAVVATVDRGFYNTLVSVAKEHERNHPE

SEQ ID NO: 9499 - protein, 1029 aa, synthetic construct
  REGION 1..1029: note = Synthetic
MSKKILGLDIGSNSIGWALLEGDDGKASNIIDLGSRIFTKAVEDKTPTPKNVKRRDARLTRRVLQRRARRKQRMLNYLIKLKLLPQELSGHTQPEVILNDLGDPYQLRKKALDSALSAHEMGRVLLHLVQRRGFLSNRKTLLGEMADDPDVLDVLEELESEGNTSTEAEKEETAFKKDISELRNKIEESGSRTLGEYLAGFGKHISTRNRSHDGGHLRTDRKMYFDELNKIWEVQEEFHDQINSEVKEQIDQIIFYQRPLKLRSDRVGKCSLETAKKRARIGRLEYQRFRYLQDISNLTYFDPYQEKNVRLTSDQRKIIVAHFEDKANPTFAQLRTLLGFGRDKTYSFNLETDNKKLKGNITRIKVKSVCPQWDDFTEEKQYGLVEDLLTINKKSVLKNRLINHWEFPLSVAIDLCLLEFEPGHGSLSVKAINKLLPFLEDGYIYSDAREKAGYGYEREEITPEDKLGKPPSTSNPIVNKGLQEVRRVVNAIIKEYGKPDIIRIEMARDLEMNTKRYKAQQKQQNQNTKANEDAQSEFEKVGKANPHLKLRTYASRQDKLKYRLWKDQDTRCAYSGKVINLSILFSGEIEIDHILPYSQSLDDSYMNKVVCYAAENQKKAQQTPRDAFGHDEEKWNQIAQAVSRWDKSIQSKKNRFYQRAEDVQARDFISSQLNDTRYITRVALGYLATLGSDITTCKGQITAWLRHQWGLNSLIGVSDKKERIDHRHHAIDAAVVATVDRGFYNTLVSVAKQHERNHPELKTKDLHIDPPWDSLRDDMDKKLSNVVIAHDAQNKLSGALHEDTGVGYVHGQGTVTRKTLNPEFNQASKIYDEGVRELVQQCLEKSGNDPKKAFAEGFRLLHKDGITPIKRVRILQSSTTLEKLVNKKFGVRNKDGQVFKWLAYGNYHHVEIIKNKKTGKYSGRFVTMMEANHRAKGIGQGKSAIIRTDCDGDDEFIMSLVINDIVRLENAAGEYYRIQKLEEPSKLGLRLHTASTLQFKSEAIRMSISSLFAKHNMRKVLVNSIGKFR

SEQ ID NO: 9500 - protein, 1029 aa, synthetic construct
  REGION 1..1029: note = Synthetic
MSKKILGLDIGSNSIGWALLEGDDGKASNIIDLGSRIFTKAVEDKTPTPKNVKRRDARLTRRVLQRRARRKQRMLNYLIKLKLLPQELSGHTQPEVILNDLGDPYQLRKKALDSALSAHEMGRVLLHLVQRRGFLSNRKTLLGEMADDPDVLDVLEELESEGNTSTEAEKEETAFKKDISELRNKIEESGSRTLGEYLAGFGKHISTRNRSHDGGHLRTDRKMYFDELNKIWEVQEEFHDQINSEVKEQIDQIIFYQRPLKLRSDRVGKCSLETAKKRARIGRLEYQRFRYLQDISNLTYFDPYQEKNVRLTSDQRKIIVAHFEDKANPTFAQLRTLLGFGRDKTYSFNLETDNKKLKGNITRIKVKSVCPQWDDFTEEKQYGLVEDLLTINKKSVLKNRLINHWEFPLSVAIDLCLLEFEPGHGSLSVKAINKLLPFLEDGYIYSDAREKAGYGYEREEITPEDKLGKPPSTSNPIVNKGLQEVRRVVNAIIKEYGKPDIIRIEMARDLEMNTKRYKAQQKQQNQNTKANEDAQSEFEKVGKANPHLKLRTYASRQDKLKYRLWKDQDTRCAYSGKVINLSILFSGEIEIDHILPYSQSLDDSYMNKVVCYAAENQKKAQQTPRDAFGHDEEKWNQIAQAVSRWDKSIQSKKNRFYQRAEDVQARDFISSQLNDTRYITRVALDYLATLGSDITTCKGQITAWLRHQWGLNSLIGVSDKKERIDHRHHAIDAAVVATVDRGFYNTLVSVAKQHERNHPELKTKDLHIDPPWDSLRDDMDKKLSNVVIAHDAQNKLSGALHEDTGVGYVHGQGTVTRKTLNPEFNQASKIYDEGVRELVQQCLEKSGNDPKKAFAEGFRLLHKDGITPIKRVRILQSSTTLEKLVNKKFGVRNKDGQVFKWLAYGNYHHVEIIKNKKTGKYSGRFVTMMEANHRAKGIGQGKSAIIRTDCDGDDEFIMSLVINDIVRLENAAGEYYRIQKLEEPSKLGLRLHTASTLQFKSEAIRMSISSLFAKHNMRKVLVNSIGKFR

SEQ ID NO: 9501 - protein, 936 aa, synthetic construct
  REGION 1..936: note = Synthetic
MSKKILGLDIGSNSIGWALLEGDDGKASNIIDLGSRIFTKAVEDKTPTPKNVKRRDARLTRRVLQRRARRKQRMLNYLIKLKLLPQELSGHTQPEVILNDLGDPYQLRKKALDSALSAHEMGRVLLHLVQRRGFLSNRKTLLGEMADDPDVLDVLEELESEGNTSTEAEKEETAFKKDISELRNKIEESGSRTLGEYLAGFGKHISTRNRSHDGGHLRTDRKMYFDELNKIWEVQEEFHDQINSEVKEQIDQIIFYQRPLKLRSDRVGKCSLETAKKRARIGRLEYQRFRYLQDISNLTYFDPYQEKNVRLTSDQRKIIVAHFEDKANPTFAQLRTLLGFGRDKTYSFNLETDNKKLKGNITRIKVKSVCPQWDDFTEEKQYGLVEDLLTINKKSVLKNRLINHWEFPLSVAIDLCLLEFEPGHGSLSVKAINKLLPFLEDGYIYSDAREKAGYGYEREEITPEDKLGKPPSTSNPIVNKGLQEVRRVVNAIIKEYGKPDIIRIEMARDLEMNTKRYKAQQKQQNQNTKANEDAQSEFEKVGKANPHLKLRTYASRQDKLKYRLWKDQDTRCAYSGKVINLSILFSGEIEIDHILPYSQSLDDSYMNKVVCYAAENQKKAQQTPRDAFGHDEEKWNQIAQAVSRWDKSIQSKKNRFYQRAEDVQARDFISSQLNDTRYITRVALDYLATLGSDITTCKGQITAWLRHQWGLNSLIGVSDKKERIDHRHHAIDAAVVATVDRGFYNTLVSVAKQHERNHPELKTKDLHIDPPWDSLRDDMDKKLSNVVIAHDAQNKLSGALHEDTGVGYVHGQGTVTRKTLNPEFNQASKIYDEGVRELVQQCLEKSGNDPKKAFAEGFRLLHKDGITPIKRVRILQSSTTLEKLVNKKFGVRNKDGQVFKWLAYGNYHHVEIIKNKKTGKYSGRFVTMMEANHRAK

SEQ ID NO: 9502 - protein, 1029 aa, synthetic construct
  REGION 1..1029: note = Synthetic
MSKKILGLDIGSNSIGWALLEGDDGKASNIIDLGSRIFTKAVEDKTPTPKNVKRRDARLTRRVLQRRARRKQRMLNYLIKLKLLPQELSGHTQPEVILNDLGDPYQLRKKALDSALSAHEMGRVLLHLVQRRGFLSNRKTLLGEMADDPDVLDVLEELESEGNTSTEAEKEETAFKKDISELRNKIEESGSRTLGEYLAGFGKHISTRNRSHDGGHLRTDRKMYFDELNKIWEVQEEFHDQINSEVKEQIDQIIFYQRPLKLRSDRVGKCSLETAKKRARIGRLEYQRFRYLQDISNLTYFDPYQEKNVRLTSDQRKIIVAHFEDKANPTFAQLRTLLGFGRDKTYSFNLETDNKKLKGNITRIKVKSVCPQWDDFTEEKQYGLVEDLLTINKKSVLKNRLINHWEFPLSVAIDLCLLEFEPGHGSLSVKAINKLLPFLEDGYIYSDAREKAGYGYEREEITPEDKLGKPPSTSNPIVNKGLQEVRRVVNAIIKEYGKPDIIRIEMARDLEMNTKRYKAQQKQQNQNTKANEDAQSEFEKVGKANPHLKLRTYASRQDKLKYRLWKDQDTRCAYSGKVINLSILFSGEIEIDHILPYSQSLDDSYMNKVVCYAAENQKKAQQTPRDAFGHDEEKWNQIAQAVSRWDKSIQSKKNRFYQRAEDVQARDFISSQLNDTRYITRVALDYLATLGSDITTCKGQITAWLRHQWGLNSLIGVSDKKERIDHRHHAIDAAVVATVDRGFYNTLVSVAKQHERNHPELKTKDLHIDPPWDSLRDDMDKKLSNVVIAHDAQNKLSGALHEDTGVGYVHGQGTVTRKTLNPEFNQASKIYDEGVRELVQQCLEKSGNDPKKAFAEGFRLLHKDGITPIKRVRILQSSTTLEKLVNKKFGVRNKDGQVFKWLAYGNYHHVEIIKNKKTGKYSGRFVTMMEANHRAKGIGQGKSAIIRTDCDGDDEFIMSLVINDIVRLENAAGEYYRIQQLEEPSKLVLRLHTASTLQFKSEAIRMSISSLFAKHNMRKVLVNSIGKFR

SEQ ID NO: 9503 - protein, 1029 aa, synthetic construct
  REGION 1..1029: note = Synthetic
MSKKILGLDIGSNSIGWALLEGDDGKASNIIDLGSRIFTKAVEDKTPTPKNVKRRDARLTRRVLQRRARRKQRMLNYLIKLKLLPQELSGHTQPEVILNDLGDPYQLRKKALDSALSAHEMGRVLLHLVQRRGFLSNRKTLLGEMADDPDVLDVLEELESEGNTSTEAEKEETAFKKDISELRNKIEASGSRTLGEYLAGFGKHISTRNRSHDGGHLRTDRKMYFDELNKIWEVQEEFHDQINSEVKEQIDQIIFYQRPLKLRSDRVGKCSLETAKKRARIGRLEYQRFRYLQDISNLTYFDPYQEKNVRLTSDQRKIIVAHFEDKANPTFAQLRTLLGFGRDKTYSFNLETDNKKLKGNITRIKVKSVCPQWDDFTEEKQYGLVEDLLTINKKSVLKNRLINHWEFPLSVAIDLCLLEFEPGHGSLSVKAINKLLPFLEDGYIYSDAREKAGYGYEREEITPEDKLGKPPSTSNPIVNKGLQEVRRVVNAIIKEYGKPDIIRIEMARDLEMNTKRYKAQQKQQNQNTKANEDAQSEFEKVGKANPHLKLRTYASRQDKLKYRLWKDQDTRCAYSGKVINLSILFSGEIEIDHILPYSQSLDDSYMNKVVCYAAENQKKAQQTPRDAFGHDEEKWNQIAQAVSRWDKSIQSKKNRFYQRAEDVQARDFISSQLNDTRYITRVALGYLATLGSDITTCKGQITAWLRHQWGLNSLIGVSDKKERIDHRHHAIDAAVVATVDRGFYNTLVSVAKQHERTHPELKTKDLHIDPPWDSLRDDMDKKLSNVVIAHDAQNKLSGALHEDTGVGYVHGQGTVTRKTLNPEFNQASKIYDEGVRELVQQCLEKSGNDPKKAFAEGFRLLHKDGITPIKRVRILQSSTTLEKLVNKKFGVRNKDGQVFKWLAYGNYHHVEIIKNKKTGKYSGRFVTMMEANHRAKGIGQGKSAIIRTDCDGDDEFIMSLVINDIVRLENAAGEYYRIQQLEEPSKLVLRLHTASTLQFKSEAIRMSISSLFAKHNMRKVLVNSIGKFR

SEQ ID NO: 9504 - protein, 976 aa, synthetic construct
  REGION 1..976: note = Synthetic
MSKHILGLDLGTNSIGWALLEEDKGQPTKIIDLGSRIFIRAVEEKTPTPKNVKRREARLTRRVIQRRARRKKRMLHYLVKLGLLPSELVGHSQPEIILNTLGDPYQLRKKALDHRLDNHELGRVLLHLVQRRGFLSNRKTLLSDMLDDPDVQAVFAEHDDEDEDNASKRMKEEKQFNGEIKKLRETIKQTDCRTLGEYLASLEKHECKRNRGHDEAYLRTDRQMYRDELDLIWREQTKHHAQLQGNVKEQIQEIIFYQRPLKLRPDRIGKCSLEPTRKRANMARLEAQQFRFLQDINSMYYSDPDHGQKQPFTPDQRKELIDLFEHDPAPSFAKIKKKLNLHRKTEFNLANDTKKLKGNTTACKIRKVLDDWDAFDANKQMALVEDLLTIKKKPDLKNRLMLHWSFDGKTAVRLCELEFEGGYSRHSVKVINRLLPFLEHGQIYSEARQNAGYGYENKKIKPVDRLGPSPDLPNPIVKKALAELRRLINALIAEYGKPDAIRIEMARDLKMSKKALDIYEKQQIANKKTNDAAIELYQQVREKNPHLNLPEAPSLTDKIKFRLWKEQKQCCAYSGKIISCSTLFSEQLEIDHILPQSQSLDNAYMNKVICYAEENRHKGQRTPIDAFGGNTQKWEQITQAINNWDSKLMSKKNRFFTTAEELQGHDFINSQLNDTRYICTEAKDYVLQLGVDVNVSKGGITAIVRRLWGIKKDRSDHRHHAIDAVVTACLDRRFYRELVRYAKAYEQSHSEFNITQSPDKEPWPNFRNELQNKLDEMIVAHTPQRKLYDELHEKTGYGFIEGQGTVYRKRLREYFNKCTTEKDADKKLKGIYEKPVRNAVKVHLAKHGFNAKTAFAEGVTVFHENGKTPIKRVRILKSKTANTKKELENSKFGIKDKQGEVFKWMQYGNLHHVEICRHKETGEYTGLFVTMMEASHRVRGINRKKQSIIKTDHGENHEFIMALHINDLVSIEQEAK

SEQ ID NO: 9505 - protein, 946 aa, synthetic construct
  REGION 1..946: note = Synthetic
MSKHILGLDLGTNSIGWALLEEDKGQPTKIIDLGSRIFIRAVEEKTPTPKNVKRREARLTRRVIQRRARRKKRMLHYLVKLGLLPSELVGHSQPEIILNTLGDPYQLRKKALDHRLDNHELGRVLLHLVQRRGFLSNRKTLLSDMLDDPDVQAVFAEHDDEDEDNASKRMKEEKQFNGEIKKLRETIKQTDCRTLGEYLASLEKHECKRNRGHDEAYLRTDRQMYRDELDLIWREQTKHHAQLQGNVKEQIQEIIFYQRPLKLRPDRIGKCSLEPTRKRANMARLEAQQFRFLQDINSMYYSDPDHGQKQPFTPDQRKELIDLFEHDPAPSFAKIKKKLNLHRKTEFNLANDTKKLKGNTTACKIRKVLDDWDAFDANKQMALVEDLLTIKKKPDLKNRLMLHWSFDGKTAVRLCELEFEGGYSRHSVKVINRLLPFLEHGQIYSEARQNAGYGYENKKIKPVDRLGPSPDLPNPIVKKALAELRRLINALIAEYGKPDAIRIEMARDLKMSKKALDIYEKQQIANKKTNDAAIELYQQVREKNPHLNLPEAPSLTDKIKFRLWKEQKQCCAYSGKIISCSTLFSEQLEIDHILPQSQSLDNAYMNKVICYAEENRHKGQRTPIDAFGGNTQKWEQITQAINNWDSKLMSKKNRFFTTAEELQGHDFINSQLNDTRYICTEAKDYVLQLGVDVNVSKGGITAIVRRLWGIKKDRSDHRHHAIDAVVTACLDRRFYRELVRYAKAYEQSHSEFNITQSPDKEPWPNFRNELQNKLDEMIVAHTPQRKLYDELHEKTGYGFIEGQGTVYRKRLREYFNKCTTEKDADKKLKGIYEKPVRNAVKVHLAKHGFNAKTAFAEGVTVFHENGKTPIKRVRILKSKTANTKKELENSKFGIKDKQGEVFKWMQYGNLHHVEICRHKETGEYTGFFVTMMEASHRVRGINRKKQ

SEQ ID NO: 9506 - protein, 1029 aa, synthetic construct
  REGION 1..1029: note = Synthetic
MSKKILGLDLGSNSIGWALLEEHNGKPGKIIGLGSRIFTKSVEEKTPTPKNVKRRNARLTRRILQRRARRKLRMLNYLISLKLLPQELTDNPSPEIILNTLGNPYQLRAKALDYPLQPFELGRVLLHLVQRRGFLSNRKTLLGDMADDPDVLEVLAELEGEDDNGSERAKEETAFKADISKLKSTIAESGKRTLGEYLASLDHHDCKRNRKTDGGHLRTDRQMYRDELDLIWRQQKQHHPVLTDTVKEEIETIIFYQRPLKLRADRIGQCSLEPAKTRTRIARLESQRFRYLQDINNLQYFDPYSDTYVTVNENDKQKLVKLFETTETISFAAIRKALGFGKNYEFNLETGNKKLKGNITACEIRKQLPTWDTFGDAKQRDLVEDLVTITKKSVLKKRLMVHWRFDAATSVQLCLLEFEPGHSNLSLKAINKLLPFLQQGQIYSDARISAGYGYEVKEITVKEKLGTPPELPNPIVKKALHELRRLINAIIAEYGKPDAIRIEMARDLEMNTKRYQDFIKQQGKNTKANDEAEEKYKQQAQLSPHLKLSKYPSKPDKLKYRLWQDQKQLCAYSGKTISLSELFSANIEIDHIWPYSLSLDDSYMNKVVCYVKENRNKGQRTPVDAFGGEQWNQITQAINRWDRPLKSKRDRFFTPTAELQQRDFINNQLNDTRYISKVAQTYLKELGADINVSKGATTAWLRHIWGLNDLIGETDKKERTDHRHHAIDALVIACINRSLYQALVKTAQDLERKQTGLDMKDMVIDPPWLNLREDLDQKLKEIIIAHAPQLKLSGELHEVTGAGFIEGIGNVNRKDLDGTFTQVDKIIDSTVKEIVAQHLQDYGNNPKLAFTEGVKVLHKDGKTPIKRVRVLQSKTTLAKLEKTKFGARDKQGKVFKWLAYGNMHHVEIIKNKETGAYSGQFVTMMEASRRVKGINMPRQPIIKTDHGADYDFVMALHINDLVSIEKEGKRVFYRVQKLDSGSNRFVLRLHTTTTLDNKNEEIYFSINENSFATWRLQKHSINAIGKIIE

SEQ ID NO: 9507 - protein, 986 aa, synthetic construct
  REGION 1..986: note = Synthetic
MSKQILGLDLGSNSIGWALLEEHDGKPDKIIQIGSRIFTKAVEEKTPTPKNVNRRNARLSRRITQRRARRKLRMLNYLIKLNLLPPELTDNPEPEKILNELGNSYALRTKALDDALTPFELGRVFLHLVQRRGFLSNRKTLLGDMADDPDVQDLLAELEAEELREAKHSKKSTSANEDDKKDQANEESAFKADIEQLRNKITASNYRTLGEYLNALNPLDCQRNRIRDGGHLRTDRQMYRDELNQIWQQQSQHHTVLTDAVKAQLEDIIFKQRPLKLNSDSIGQCSLEPKNKRAKIARLECQRFRYLQDINNLNYFDQNTHQTHALDETARQKLITLFETTAHVSFAGIKKALGLKNVEFNLEHGNKNLKGNLTACAIRKHLPDWDNYDADKQKAFVEDLLTITKKSVLKNRLMNHWGLSLATSVQLCLLEFEAGHSNLSLKAINKLLPFLQQGQIYSDARVSAGYGYELENIEPKNKLGTPPETANPIVNKALHELRRVINAIIAEYGKPATIRIEMARDLEMNTQRYQDFIKQQTKNTKANEAAEKAFQEIAQTTPQLALSKYPSKTDKLKYRLWTEQKSCCAYSGKPINLSELFTANIEIDHILPYSQSLDDSYMNKVVCYGSENHYKGQHTPIEAFSGHADKWQQIRQRIKSWHKAKRDRFTATDAELQKRDFISTQLNDTRHISRLAQTYLANLGADISVSKGITTAWLRHQWGLNNLIGETENKDRTDHRHHAIDAVVIACVDRRLYQVLVHTAKDLERRNSELNMKDVHLDPPWQRLRDDLEQALDSVIIAHTPQRKLSGELHEVTGAGFIHGVGNVHRKNLSPDFKQEDKIIDETVKDCVKKHLAQYDNDPKKAFAENITVLHKDGKTPIKRVRILQSKTTLDKLQKTKFGVKNKQGKVFKWLSFGNLHHVEIVKHQITGAYSGQFVTMMEASHRAKGIKMPRQPIIKTDHGADYEFIMALHINDLVSVEKDGRRVYY

SEQ ID NO: 9508 - protein, 761 aa, synthetic construct
  REGION 1..761: note = Synthetic
MSKQILGLDLGSNSIGWALLEEHEGKPDKIIQIGSRIFTKAVEEKTPTPKNVNRRNARLSRRITQRRARRKLRMLKYLIKLKLLPPELANNPEPEKILNELDNPYALRAKALDEPLTPFELGRVFLHLVQRRGFLSNRKTLLGDMADDPDVQEVLAELEAEEQRDTKPTKTDDAQSTEESAFKADIEQLRNKITASNYRTLGEYLNALNPMDCQRNRIRDGGHLRTDRQMYRDELNQIWQQQSQHHTVLTDTVKAQLEDIIFKQRPLKLNSDSIGQCSLEPKNKRAKMARLECQRFRYLQDINNLNYFDQNTHQTHSLDETARQKLILLFETTAHVSFAGIKKTLVLKNVEFNLERGNKNLKGNLTACKIRKHLPDWDNYDTDKQKAFVEDLLTITKKSVLKNRLINHWGLSLPTAVQLCLLEFETGHSNLCLKAINKLLPFLQQGQIYSDARISAGYGYEPENIEPKNKLGIPPETANPIVNKALHELRRVINAIIAEYGKPAAIRIEMARDLEMNTQRYQDFIKQQTKNTKANEAAEKAFAEIAQKTPQLALSKYPSKTDKLKYRLWQEQKSCCAYSGKPINLSELFTANIEIDHILPYSQSLDDSYMNKVVCYGSENHYKGQRTPIEAFSGHADKWQQIRQRIKSWHKAKRDRFTVTAAELQKRDFISTQLNDTRHISRLAQTYLADLGADISVSKGITTAWLRHQWGLNNLIGETENKDRTDHRHHAIDAVVIACVDRRLYQVLVHTAKDLERRNSE

SEQ ID NO: 9509 - protein, 1038 aa, synthetic construct
  REGION 1..1038: note = Synthetic
MSKQILGLDLGSNSIGWALLEEHEGKPDKIIQIGSRIFTKAVEEKTPTPKNVNRRNARLSRRITQRRARRKLRMLKYLIKLKLLPPELANNPEPEKILNELDNPYALRAKALDEPLTPFELGRVFLHLVQRRGFLSNRKTLLGDMADDPDVQEVLAELEAEEQRDTKPTKTDDAQSTEESAFKADIEQLRNKITASNYRTLGEYLNALNPMDCQRNRIRDGGHLRTDRQMYRDELNQIWQQQSQHHTVLTDTVKAQLEDIIFKQRPLKLNSDSIGQCSLEPKNKRAKMARLECQRFRYLQDINNLNYFDQNTHQTHSLDETARQKLILLFETTAHVSFAGIKKTLVLKNVEFNLERGNKNLKGNLTACKIRKHLPDWDNYDTDKQKAFVEDLLTITKKSVLKNRLINHWGLSLPTAVQLCLLEFETGHSNLCLKAINKLLPFLQQGQIYSDARISAGYGYEPENIEPKNKLGIPPETANPIVNKALHELRRVINAIIAEYGKPAAIRIEMARDLEMNTQRYQDFIKQQTKNTKANEAAEKAFAEIAQKTPQLALSKYPSKTDKLKYRLWQEQKSCCAYSGKPINLSELFTANIEIDHILPYSQSLDDSYMNKVVCYGSENHYKGQRTPIEAFSGHADKWQQIRQRIKSWHKAKRDRFTVTAAELQKRDFISTQLNDTRHISRLAQTYLADLGADISVSKGITTAWLRHQWGLNNLIGETENKDRTDHRHHAIDAVVIACVDRRLYQVLVHTAKDLERRNSELNMKDVHLDPPWQRLRDDLEQALDSVIIAHTPQRKLSGELHEVTGAGFIHGVGNVHRKNLSPDFKQEDKIIDETVKDCVKQHLAQYGNDPKKAFAENITVLHKDGKTPIKRVRILQSKTTLEKLQKTKFGVKNKQGKVFKWLSFGNLHHVEIVKHKTTSAYSGQFVTMMEASHRAKGIKIPRQPIIKTDHGADYEFIMALHINDLVSVEKEGRRVYYRLQKLDSGINRVMLRLHTAAKLDNKVEELHLSINEKIFTTWQLQKHSINAIGKLQIPKNG

SEQ ID NO: 9510 - protein, 1034 aa, synthetic construct; identical to SEQ ID NO: 4977
  REGION 1..1034: note = Synthetic

SEQ ID NO: 9511 - protein, 1022 aa, synthetic construct; identical to SEQ ID NO: 4984
  REGION 1..1022: note = Synthetic

SEQ ID NO: 9512 - protein, 919 aa, synthetic construct
  REGION 1..919: note = Synthetic
MSKTILGLDLGSNSIGWALLEEHEGKPDKIIKLGSRIFTKAVEEKTPTPKNVKRRNARLTRRITQRRARRKLRMLNYLVKLNLLPPELTNNPTPEIILNELGNPYALRAKALDHALTPFELGRVFLHLVQRRGFLSNRKTLLGDMADDPDVLDILAELEAEEDHSTEQAKEETAFKADISHLKATIAQSGCRTLGEYLASFDVHDCQRNRIRDGGHLRTDRQMYRDELDKIWQQQKRHHAILTDEVREQLDEIIFKQRPLKLNSDRVGNCSLEPTRKRAKTARLECQRFRYLQDINNLQYINSLGISTTLTSEEKDKLITLFETTAHVSFAGIKKALNLKGVEFNLENGTKKLKGNLTACDIRKHLPDWDTYDEAKQLALVEDLLTITKKSVLKTRLMKHWGLSLHTAVQLCLLEFEAGHSNLSLKAINKLLPFLQQGQIYSDARVSTGYGYEVSEIKPTDKLGTPPETANPIVNKALHELRRVINAIIAEHGKPDAIRIEMARDLEMNTQRYQDFLKQQKRNTKANDDAEKAYQTEARKNSLASSKKASKTDKLKYRLWQEQKNTCIYSGKPISLSELFTAQLEIDHILPYSQSLDDSYMNKVVCFASENHYKGQRTPIDAFSGHSDKWQQIRHRFKSLHKAKQARFSVTATDLQKRDFISTQLNDTRHISRLAQTYLAELGADISVSKGITTAWLRHQWGLNNLIGETDNKDRTDHRHHAIDAVVIACVDRRLYQTLVYIANDLERRHSELSMKDVHLDPPWHHLREDLELALDSVIIAHTPQRKLSGELHEVTGAGFIHGVGNVHRKTLNASFTQVDKIIDEAVKEQVQQHLNRYDNDPKAAFAENVTVLHKDGKTPIKRVRIVQSKTTLDKLAKTKFGARDKQGKVFKWLAFGNLHHVEIIKHKETGAYSGQFVT

SEQ ID NO: 9513 - protein, 1023 aa, synthetic construct
  REGION 1..1023: note = Synthetic
MSKTILGLDLGSNSIGWALLEEYEGKPDKIIKIGSRIFTKAVEEKTPTPKNVKRRTARLTRRITQRRARRKLRMLNYLVKLNLLPPELTNNPSPEIILNELGNPYALRANALDHALTPFELGRVFLHLVQRRGFLSNRKTLLGDMADDPDVLDILAELEAEEDHSTEQAKEETAFKADISQLKATIAQSGCRTLGEYLASFDVHDCQRNRIRDGGHLRTDRQMYRDELDKIWQQQKRYHAILTNEVREQLDEIIFKQRPLKLNSDRIGRCSLEPKNKRAKIARLECQRFRYLQDINNLQYINHLGVSTILTSEEKHKLITLFETTAHVSFAGIKKALNLKGVEFNLENGTKKLKGNLTACDIRKHLPDWDLYDEAKQLALVEDLLTITKKSVLKTRLMQHWESTLHTAVQLCLLEFEAGHSNLSLKAINKLLPFLQQGQIYSDARVSAGYGYEVSDIKPTEKLGTPPETANPIVNKALHELRRVINAVIAEHGKPDAIRIEMARDLEMNTQRYQDFLKQQKRNTKANEDAEKAYQKNAPLAVSKKASKADKLKYRLWQEQKNTCVYSGKPINLSELFTAQLEIDHILPYSQSLDDSYMNKVVCFASENHYKGQRTPIDAFSGHTDKWQQIRHRMKSLHKAKQARFSTTATDLQQRDFISTQLNDTRHISRLAQSYLAELGANISVSKGITTAWLRHQWGLNNLIGETDNKDRTDHRHHAIDAVVIACVDRRLYQTLVYIANDLERRHSELTMRDVHLDPPWHHLREDLELALDSVIIAHTPQRKLSGELHEVTGAGFIHGVGNVHRKTLNASFTQVDKIIDDAVKEQVQQHLAYYDNDPKAAFAENVTVLHKDGKTPIKRVRIVQSKTTLDKLEKTKFGAKDKQGKVFKWLAFGNLHHVEIIRHNETGVYSGQFVTMMEASHRAKGIKMPQQAIIKTDHGADYDFIMALHINDLVSVEKNGRRVYYRVQVLDSANKRISLRLHTAATIKIATETLLDRESTIPALMQAGLQKHTINAIGKFTE

SEQ ID NO: 9514 - protein, 678 aa, synthetic construct
  REGION 1..678: note = Synthetic
MQMSKVILGLDLGSNSIGWALLKEKDGKPNEIINIGSRIFTKAVEEKTPTPKNVKRRNARLSRRVTQRRARRKLRMLNYLIQLNLLPQELTANPTPEIILNDLGNPYCLRAKALDKPVSAFELGRILLHLVQRRGFLSNKKTMLGDMAEDPDVLDALAELEDEDDNGTESAKEETAFKADISQLKNTIAELGLRTLGEYLATLDHHECKRNRIRDGGHLRTDRQMYRDELDLIWEQQKHYHVILTDEVKDQIEDIIFKQRPLRLNADRIGKCSLEPTRKRAKVARLECQRFRYLQDINNLQYFDYYTEKSLSLNDQAKQKLVQLFETTANVSFAGIRKALGFDKTIEFNLENGNKKLKGNITACEIRKQLPEWDSFDDVKQHALVEDLLTINKKSVLKNRLTGHWGFSIPIAVQLCLLEFEPGHSNHSIKAINKMLPYLQEGQIYSDARVSAGYDYEVSKIDVTEKLGVPPETANPIVNKALHELRRLINAIIAEYGKPDAIRIEMARDLEMNTKRYQDFIKQQSKNTKANDEATRKYQEMGQKNPQFTLSKYPGKTDKLKYRLWQDQKNCCAYSGKPITISELFSATIEVDHILPYSESLDDSYMNKVVCYTSENRNKGQKTPIDAFGGNSEKWNQITGSISRWHGALKSKKARFFTTAAELQKRDFISTQLNDTRH

SEQ ID NO: 9515 - protein, 1031 aa, synthetic construct
  REGION 1..1031: note = Synthetic
MSKVILGLDLGSNSIGWALLKEQNGKPNEIINIGSRIFTKAVEEKTPTPKNVKRRNARLSRRVTQRRARRKLRMLNYLVKLNLLPQELTGNPTPEILLNELGSPYLLRAKALDSPLTKFEMGRVLLHLVQRRGFLSNRKTLLGDMADDPDVLDVLSELEGEDDNSSDRAKEETAFKADISQLKKAINENGFRTVGEYLASLDHHDCKRNRSRDGGHLRTDRQMYRDELDLIWEQQKTHHEELTDAVKDQIEDIIFKQRPLKFNADRIGKCSLEPSRKRAKIARLECQRFRYLQDINNLQYFDYYTEKSISLDGLAKQKLVQLFETTANVSFAGIRKALGFDKTIEFNLENGNKKLKGNITACEIRKQLPEWDSYEDGKQHALVEDLLTINKKSVLKNRLTGHWGFCPNTAVQLCLLEFEPGHSNHSTKAISKMLPFLKQGQIYSDARVNADYGYEITKLEFTDKLGAPPETSNPIVNKALHELRRLINAIIAEYGKPDAIRIEMARDLEMNTKRYQDFIKQQSKNTKANDEAVNSYQEMGQKNPHLALSKYPSKTDKLKYRLWQDQKQSCAYSGKLISKSELFSSAIEIDHILPYSESLDDSYMNKVICYTSENRFKGQKTPIDAFGGNTDKWSQITHAINKWDRSLKSKKARFFTTFSELQKRDFISTQLNDTRYIGQVAQGYLAELGADISVSKGITTAWLRHQWGLNSLIGETDKKERTDHRHHAIDAVVVACVDRRLYQALVNTAKELERSQTELNMKDIYIDPPWDNLRDDLEKSLAKVIIAHVPQLKLTGELHETTGAGFIEGIGNVNRKNLDGSFTQVDKIIDPIVRELVEQHLENHGDNPKNAFAEGVTVYHKDGKTAIKRVRVLQSKTTLEKLGKSKFGAKDKQGKVFKWLAFGNMHHVEIIKHKATGKCSGQFVTTMEATHRAKGINMPKQSIIKTNHGKDHEFILALHINDLVSMEKDGQCFFYRVQNMEAGDNRIMFRLHNTSVLGNKSEGLRLSVNNGLFDIWQLQKHSVNAIGKLIG

SEQ ID NO: 9516 - protein, 769 aa, synthetic construct
  REGION 1..769: note = Synthetic
MLNYLIKLNLLPQELTNNPTPEILLNELGSPYLLRAKALDSQLTKFELGRVLLHLVQRRGFLSNRKTLLGDMADDPDVLDVLSELEGEDDNSSDRAKEETAFKADISKLKKTISDIGFRTLGEYLASLDHHDCKRNRSRDGGHLRTDRQMYRDELNLIWEQQKQYHNALTDTVNIQIEEIIFKQRPLKLNPDRIGKCSLETNRKRAKIARLECQRFRYLQDINNLQYFNYYTEKSTSLDDSAKQKLVHLFETTANISFAGIRKALGFDKTTEFNLENGNKKLKGNITACEIRKQLPEWDSLDDSKQHALVEDLLTINKKSVLKNRLTGHWGFSANTAVQLCLLEFEPGHSNHSAKAIGKMLPFLQQGQIYSDARISAEYGYEVTKINVADKLGAPPETSNPIVNKALHELRRLINAIIAEYGKPNAIRIEMARDLEMNTKRYQDFIKQQSKNTKANDEAISSYQEMGQKNPHLALSKYPSKTDKLKYRLWQDQKQCCAYSGNPITKSELFSSAIEVDHILPYSESLDDSYMNKVICYTSENRFKGQKTPIDAFGGNTDKWNQITHSINKWDRSLKSKKARFFTTFAELQKRDFISTQLNDTRYIGQVAQGYLIELGADISVSKGITTAWLRHQWGLNSLIGETDKKERTDHRHHAIDALVVACVDRRLYQALVNTAKELERSQTELNMKDIYIDPPWHNLRNDLEQALDKVIIAHVPQLKLTGELHETTGAGFINGIGNVNRKNLDGSFTQVDKIIDPIVRELVGLHLE

SEQ ID NO: 9517 - protein, 536 aa, synthetic construct
  REGION 1..536: note = Synthetic
MQMSKVILGLDLGSNSIGWALLKEKDGKPNEIINIGSRIFTKAVEEKTPTPKNVKRRNARLSRRVTQRRARRKLRMLNYLIKLNLLPQELTNNLTPEILLNELGSPYLLRAKALDSTLTKFELGRVLMHLVQRRGFLSNRKTLLGDMADDPDVLDVLSELEGEDDNSSERAKEETAFKADISKLKKTISDIGFRTLGEYLASLDHNDCKRNRSRDGGHLRTDRQMYRDELNLIWQQQKQYHDELTDTVKIQIEEIIFKQRPLKLNPDRIGKCSLESTRKRAKIARLECQRFRYLQDINNLQYFDYYTEKSTSLDDSAKQKLVHLFETTANVSFAGIRKALGFDKTIEFNLENGNKKLKGNITACEIRKQLPEWDSFDDNKQHELVEDLLTINKKSVLKNRLTGHWGFSANTAVQLCLLELEPGHSNHSAKAIGKMLPFLQQGQIYSDARVSANYGYEVAKINVADKLGTPPETSNPIVNKALHELRRLINAIIAEYGKPDAIRIEMARDLEMNTKRYQDFIKQQSKNTKANDEAIS

SEQ ID NO: 9518 - protein, 880 aa, synthetic construct
  REGION 1..880: note = Synthetic
LRGLWSLESVAYEKQFHWYEKQVGYSWLHYEYRIYIRMQMSKIILGLDLGSNSIGWALLKEKDGKPNEIINIGSRIFTKAVEEKTPTPKNVKRRNARLSRRVTQRRARRKLRMLNYLIKLNLLPPELTNNPTPEILLNELGSPYLLRAKALDTALTKFELGRVLLHLVQRRGFLSNRKTLLGDMADDPDVLDVLSELEGEDDNSSDRAKEETAFKADISQLKSTISENGFRTLGEYLASLDHHDCRRNRSRDGGHLRTDRQMYRDELNLIWEQQKNYHDVLTDTVKNQIEEIIFKQRPLKLNADRIGKCSLEPTRKRAKIARLECQRFRYLQDINNLQYFDYYTEKSTSLDDSAKQKLVQLFETTANVSFAGIRKALGFDKTTEFNLENGNKKLKGNITACEIRKQLPEWDSLGDSKQHALVEDLLTINKKSVLKNRLTGHWGFSANTAVQLCLLEFEPGHSNHSTKAIGKMLPFLQQGQIYSDARVSANYGYEVTKINVADKLGTPPETSNPIVNKALHELRRLINAIIAEYGKPDAIRIEMARDLEMNTKRYQDFIKQQSKNTKANDEAINSYQEMGQKNPHLALSKYPSKTDKLKYRLWQDQKQCCAYTGNPISKSELFSSAIEIDHILPYSESLDDSYMNKVICYTSENRFKGQKTPIDAFGGNADKWNQITQSINKWDRSLKSKKARFFTTFAELQKRDFISTQLNDTRYIGQVAQGYLAELGSDISVSKGITTAWLRHQWGLNSLIGETDKKERTDHRHHAIDALVVACVDRRLYQALVNTAKELERSQTELNMRDIYIDPPWQNLRDDLEQALDKVIIAHVPQLKLTGELHETTGAGFINGIGNVNRKNLDGSFTQVKKIIDPIVRELVGRSR

SEQ ID NO: 9519 - protein, 636 aa, synthetic construct
  REGION 1..636: note = Synthetic
MSKIILGLDLGSNSIGWALLKEKDGKPNEIINIGSRIFTKAVEEKTPTPKNVKRRNARLSRRVTQRRARRKLRMLNYLIKLNLLPPELTNNPTPEILLNELGSPYLLRAKALDTALTKFELGRVLLHLVQRRGFLSNRKTLLGDMADDPDVLDVLSELEGEDDNSSDRAKEETAFKADISQLKSTISENGFRTLGEYLASLDHHDCRRNRSRDGGHLRTDRQMYRDELNLIWEQQKNYHDVLTDTVKNQIEEIIFKQRPLKLNADRIGKCSLEPTRKRAKIARLECQRFRYLQDINNLQYFDYYTEKSTSLDDSAKQKLVQLFETTANVSFAGIRKALGFDKTTEFNLENGNKKLKGNITACEIRKQLPEWDSLGDSKQHALVEDLLTINKKSVLKNRLTGHWGFSANTAVQLCLLEFEPGHSNHSTKAIGKMLPFLQQGQIYSDARVSANYGYEVTKINVADKLGTPPETSNPIVNKALHELRRLINAIIAEYGKPDAIRIEMARDLEMNTKRYQDFIKQQSKNTKANDEAINSYQEMGQKNPHLALSKYPSKTDKLKYRLWQDQKQCCAYTGNPISKSELFSSAIEVDHILPYSESLDDSYMNKVICYTSENRFKGQKTPIDAFGGNADKWNQI

SEQ ID NO: 9520 - protein, 880 aa, synthetic construct
  REGION 1..880: note = Synthetic
LRGLWSLESVAYEKQFHWYEKQVSYSWLHYEYRIYIRMQMSKIILGLDLGSNSIGWALLKEKDGKPNEIINIGSRIFTKAVEEKTPTPKNVKRRNARLSRRVTQRRARRKLRMLNYLIKLNLLPPELTNNPTPEILLNELGSPYLLRAKALDTALTKFELGRVLLHLVQRRGFLSNRKTLLGDMADDPDVLDVLSELEGEDDNSSDRAKEETAFKADISQLKSTISENGFRTLGEYLASLDHHDCRRNRSRDGGHLRTDRQMYRDELNLIWEQQKNYHDVLTDTVKNQIEEIIFKQRPLKLNADRIGKCSLEPTRKRAKIARLECQRFRYLQDINNLQYFDYYTEKSTSLDDSAKQKLVQLFETTANVSFAGIRKALGFDKTTEFNLENGNKKLKGNITACEIRKQLPEWDSLGDSKQHALVEDLLTINKKSVLKNRLTGHWGFSANTAVQLCLLEFEPGHSNHSTKAIGKMLPFLQQGQIYSDARVSANYGYEVTKINVADKLGTPPETSNPIVNKALHELRRLINAIIAEYGKPDAIRIEMARDLEMNTKRYQDFIKQQSKNTKANDEAINSYQEMGQKNPHLALSKYPSKTDKLKYRLWQDQKQCCAYTGNPISKSELFSSAIEVDHILPYSESLDDSYMNKVICYTSENRFKGQKTPIDAFGGNADKWIQITQSINKWDRSLKSKKARFFTTFAELQKRDFISTQLNDTRYIGQVAQGYLAELGSDISVSKGITTAWLRHQWGLNSLIGETDKKERTDHRHHAIDALVVACVDRRLYQALVNTAKELERSQTELNMRDIYIDPPWQNLRDDLEQALDKVIIAHVPQLKLTGELHETTGAGFINGIGNVNRKNLDGSFTQVKKIIDPIVRELVGRSR

SEQ ID NO: 9521 - protein, 8 aa, synthetic construct
  REGION 1..8: note = Synthetic
LWDPQMNF

SEQ ID NO: 9522 - protein, 8 aa, synthetic construct
  REGION 1..8: note = Synthetic
LWDPWMSF

SEQ ID NO: 9523 - RNA, 80 nt, synthetic construct
  source 1..80: mol_type = other RNA
  variation 25..60: note = note, n is a, c, g, or t
  misc_feature 1..80: note = Synthetic
gtcccatatgttggggttaaaactnnnnnnnnnnnnnnnnnnnnnnnnnnnnnnnnnnnngtttaagtcccatatgttgg

SEQ ID NO: 9524 - protein, 74 aa, Staphylococcus epidermidis
CCEEEEEEEEEECCCCCCCCHHHHHHHHHCCCCEEECCCCCEECCHHHHHHHHHHHHHHHCCCCCCCCCCCCCC

SEQ ID NO: 9525 - protein, 76 aa, Staphylococcus epidermidis
DKFLVIEVYAKTISPLYTGEIKKEAIREARDVNLPVRRTEDGKVAIPIYGVIRAYLEKILTEKGENVCDTGAKGAK

SEQ ID NO: 9526 - protein, 20 aa, Staphylococcus epidermidis
ISPLIGDDGPIPGSSIKGLR

SEQ ID NO: 9527 - protein, 53 aa, Staphylococcus epidermidis
CCEEEEEEEEEESSCBCCCCBCCCBCTTTCCBEECHHHHHHHHHHHHHHHHTC

SEQ ID NO: 9528 - protein, 70 aa, Staphylococcus epidermidis
CEEEEEEEEEEECCCEEEECCCEEECCCCCCCCEEEECCCCCEEECCCHHHHHHHHHHHHHCCCCCCCCC

SEQ ID NO: 9529 - protein, 67 aa, Staphylococcus epidermidis
CCCCHHHHHHHHHCCCCCHHHHHHHCCHHHHHHHHHHHHCCCCCCCCCCHHHHCHHHHHCCCEEEEE

SEQ ID NO: 9530 - protein, 68 aa, Staphylococcus epidermidis
GCGRCVLCDLFGYLGRRGRAFIDDLVSKENAMKIVSSVTHNRIDRNSGTVSDALKMEEIKEGSEFYGK

SEQ ID NO: 9531 - protein, 11 aa, Staphylococcus epidermidis
LFGLFDIEIGF

SEQ ID NO: 9532 - protein, 79 aa, Staphylococcus epidermidis
NQDDERVLRLFGSSEKGNIQRARLQISDAFFSEKTKEHFAQNDIAYTETKFENTINRLTAVANPRQIERVTRGSEFDFV

SEQ ID NO: 9533 - protein, 66 aa, Staphylococcus epidermidis
CCCHHHHHHHCCCSTTCCCCCSEEECCEEECHHHHHHHHHTTCCSEEEEECCEEEEECTTCEEEEE

SEQ ID NO: 9534 - protein, 79 aa, Staphylococcus epidermidis
CCCCCHHHHHHCCCCCCCCCCCCEEEEECEECHHHHHHHHHCCCCCEEEEEECCCCCCCCCCCCEEEEEECCCCEEEEE

SEQ ID NO: 9535 - protein, 45 aa, Staphylococcus epidermidis
EEEECCCHHHHHHHHHHHHHHHHHCCCEEEECCCCEEEEEEEEEE

SEQ ID NO: 9536 - protein, 44 aa, Staphylococcus epidermidis
IRIIEPKERDIELFATAFEAMEFGIGGWVTRGRGRVDIQFKVYE

SEQ ID NO: 9537 - protein, 10 aa, Staphylococcus epidermidis
IELLIGSGGI

SEQ ID NO: 9538 - protein, 49 aa, Staphylococcus epidermidis
FIYNVDEESQVEDDFENIEKAIHLLENDYLGGGGTRGNGRIQFKDTNIE

SEQ ID NO: 9539 - protein, 47 aa, Staphylococcus epidermidis
EEEECSSGGGHHHHHHHHHHHHHHHTSCSSSCTTTTCCCEEEEEEEE

SEQ ID NO: 9540 - protein, 48 aa, Staphylococcus epidermidis
EEEEECCCCCCHHHHHHHHHHHHHHHCCCCCCCCCCCCEEEEEEEEEE

SEQ ID NO: 9541 - protein, 58 aa, synthetic construct
  REGION 1..58: note = Synthetic
CCCCCCHHHHHHHHHHHHHCCCCHHHHCCCCCCCEEEEECCEEEECCCCCCCCCCCEE

SEQ ID NO: 9542 - protein, 58 aa, synthetic construct
  REGION 1..58: note = Synthetic
EPYPVGRHIRGAFGWIAKDMGLGIKELFPDLNNDILIFRDGIPICRKERWRPFSGKKT

SEQ ID NO: 9543 - protein, 16 aa, synthetic construct
  REGION 1..16: note = Synthetic
YIPGSLGALAFLFPPK

SEQ ID NO: 9544 - protein, 78 aa, synthetic construct
  REGION 1..78: note = Synthetic
QDFIPGSVIRGALADLLLRQSRHRPGEALTGDLAALFTEARAAVFTHAYPGSGSRVLPATAFSSKNNPGFRSEAGKTG

SEQ ID NO: 9545 - protein, 71 aa, synthetic construct
  REGION 1..71: note = Synthetic
CCCCCHHHHHHHHHHHHHHCCCCCHHHHCCHHHHHHCCCCCCCCCCCCEECCCCHHHHCCCCCCCCCCCCC

SEQ ID NO: 9546 - protein, 53 aa, synthetic construct
  REGION 1..53: note = Synthetic
EEEEEEECCEEEEEECCHHHHHHCCCCCCEEEEEEECCCCCCCCCHHHHHHHH

SEQ ID NO: 9547 - protein, 53 aa, synthetic construct
  REGION 1..53: note = Synthetic
LYLPFIDGGRIKYRCSSCGDFFSQGFHRTEISRIQLDRKKGSVNSFRRIEAFH

SEQ ID NO: 9548 - protein, 10 aa, synthetic construct
  REGION 1..10: note = Synthetic
DLGIDGLYEI

SEQ ID NO: 9549 - protein, 80 aa, synthetic construct
  REGION 1..80: note = Synthetic
VFDTLLDRFCSQRLGIPFDPAEPDGSGGRVEPFGGFYSQEEGSRYRRVAVSKRLLTRVGINRRRATAADQILYSLIEVIN

SEQ ID NO: 9550 - protein, 78 aa, synthetic construct
  REGION 1..78: note = Synthetic
HHHHHHHHHHHCCCCCCCCCCCCCCCCCCCCCCCCEEECCCCCEEEECCCEEEEECCEECCCCCCCCCCCCEEEEEEC

SEQ ID NO: 9551 - protein, 63 aa, synthetic construct
  REGION 1..63: note = Synthetic
HHHHHEEEEEEEHHCCHHHHHHHHHHHHHHHHHHCCCCCHHCCCCCCCHHHHHHCHHHHHHCC

SEQ ID NO: 9552 - protein, 61 aa, synthetic construct
  REGION 1..61: note = Synthetic
REAIFRLSIILDIERGERFVEDLFSMMSFVKEFGINIGKRHQKGMGFILEEFDAKIMEDIE

SEQ ID NO: 9553 - protein, 10 aa, synthetic construct
  REGION 1..10: note = Synthetic
FILLLLGSGG

SEQ ID NO: 9554 - protein, 77 aa, synthetic construct
  REGION 1..77: note = Synthetic
EGRAGRIDGSLQPSLFSGHIYLQDRELAAALAGYLNTHARRLSLGGGVSRGLGRVSLAARHLRAPKPSLAERVAAFN

SEQ ID NO: 9555 - protein, 72 aa, synthetic construct
  REGION 1..72: note = Synthetic
CCCCCCCCCCCCEEEEEEEEECCHHHHHHHHHHHCCCCEECCCCCCCCCEEEEEEECCCCCCCHHHHHHHHH

SEQ ID NO: 9556 - protein, 59 aa, synthetic construct
  REGION 1..59: note = Synthetic
CCCCCCEEEEEEEEEEEECCCCEEEEEEEHHHHHHHHHHHCCCEEEEECCHHHHHHHHE

SEQ ID NO: 9557 - protein, 59 aa, synthetic construct
  REGION 1..59: note = Synthetic
IGEKDEFTINFISDAYIRNGDGFLDLKIKTDKIIGMMERLGNRFKIDFRGEIEEISKTL

SEQ ID NO: 9558 - protein, 7 aa, synthetic construct
  REGION 1..7: note = Synthetic
LLSPILL

SEQ ID NO: 9559 - protein, 69 aa, synthetic construct
  REGION 1..69: note = Synthetic
QKLRQRWQQWQVFGNPWQPLPPERQYFSIGLQSGAILKERWQRTTVLTPPMLQEEANCEDGSLVLELAC

SEQ ID NO: 9560 - protein, 67 aa, synthetic construct
  REGION 1..67: note = Synthetic
HHHHHHHHHHHHHHCCCCCCCCCCCCEEEEEEECCCEECCCCCCCCHHHHHHHHCCCCCCEEEEEEE

SEQ ID NO: 9561 - protein, 70 aa, synthetic construct
  REGION 1..70: note = Synthetic
ECCCCEEEEEEEECCCCEEEEEHHHHCCCEEEEEEECCCHHHHHHHHHHHHHHHCHHHHHCCCCCEEEEC

SEQ ID NO: 9562 - protein, 70 aa, synthetic construct
  REGION 1..70: note = Synthetic
IEPRNITMIQVIEDENRFIRIPLNVLSRGISIRFKRRGNSRNILKLLKAIELFYGLGDYIGLGLGEIYVN

SEQ ID NO: 9563 - protein, 17 aa, synthetic construct
  REGION 1..17: note = Synthetic
GKIGSVLLGIGEGFGVI

SEQ ID NO: 9564 - protein, 65 aa, synthetic construct
  REGION 1..65: note = Synthetic
SSYAYVSGWNAAWGLFKDVELVTTQGSVFLLSTTQMERWIPILAEMEYWGIGERTAEGFGQIEVC

SEQ ID NO: 9565 - protein, 65 aa, synthetic construct
  REGION 1..65: note = Synthetic
ECCEEECCCHHHCCCCCCCCCEECCCCEEEEEECCHHHHHHHHHHHHHCCCCCCCCCCCCEEEEC

SEQ ID NO: 9566 - protein, 70 aa, Methanosarcina mazei
CCCEECCCCEEECCCHHHHHHCCEEHHCCCCCCCHHHHCCCHHHHCHHHHCHHCCCCCCCHHHHHHCCCC

SEQ ID NO: 9567 - protein, 70 aa, Methanosarcina mazei
MRLKFLGGAREVTGSSFLLDFGYKILVDCGMRQKEEEKIFLKEEVDAVLLTHAHLDHSGLLPLLIKNNLL

SEQ ID NO: 9568 - protein, 25 aa, Methanosarcina mazei
ILGGSLLILIDGIDIITHHDHGGLL

SEQ ID NO: 9569 - protein, 79 aa, Methanosarcina mazei
VRVTALGGCKEVGRSCFLLSTPESRILIDCGVNVGSDENMTPYLYVPEVFPLNQIDAVIVTHAHLDHQGLVPLLFKYGY

SEQ ID NO: 9570 - protein, 79 aa, Methanosarcina mazei
CEEEEEECSSSSSCCEEEEECSSCEEEECCCCCCSSCSSCCCCTTSTTTCSGGGCCEEECCSSCHHHHTTHHHHHHTTC

SEQ ID NO: 9571 - protein, 79 aa, Methanosarcina mazei
EEEEEECCCCCCCCCEEEEECCCCEEEECCCCCCCCCCCCCCCCCCCCCCCCCCCCEEEECCCCHHHCCCHHHHHHCCC

SEQ ID NO: 9572 - protein, 79 aa, Methanosarcina mazei
CCCCCCCCCHHHHHHHHHHHHHHCCHHHHHHHHHCCCCHHHHHHHHHHHHHCCCCCCEEECCCEEEEEECCCEECCCEE

SEQ ID NO: 9573 - protein, 79 aa, Methanosarcina mazei
KGNVYSTPATKEVASLLLFDAAKIQREDEEKGKKALFDENDIVNLLKVWETYDLNKQFSLGNARVKFLDAGHIIGSSQI

SEQ ID NO: 9574 - protein, 13 aa, Methanosarcina mazei
VYTTIIIVAGHGS

SEQ ID NO: 9575 - protein, 77 aa, Methanosarcina mazei
EGPVYCTPPTRDLMVLLQLDYIDVAAKEGKKIPYESGMVAKTLKHTIPLDYEEVTDIAPDILKTFHNAGHILGSAIS

SEQ ID NO: 9576 - protein, 77 aa, Methanosarcina mazei
CSCEEECHHHHHHHHHHHHHHHHHHHHHTCCCCSCTHHHHHHHHTEEECCTTCCEEEETTEEEEEEECSSSTTCEEE

SEQ ID NO: 9577 - protein, 78 aa, Methanosarcina mazei
CCCEEECCCHHHHHHHHHHHHHHHHHHCCCCCCCCHHHHHHHHHHTEEECCTTCCEEEETTEEEEEEECSSSTTCEEE

SEQ ID NO: 9578 - protein, 77 aa, Methanosarcina mazei
CCCEEECCCHHHHHHHHHHHHHHHHHHCCCCCCCCHHHHHHHHHHCCCCCCCCEEECCCCEEEEEECCCCCCCCEEE

SEQ ID NO: 9579 - protein, 74 aa, Methanosarcina mazei
EEEEECEEEEEECCCCCCCCHHHCCCCCCHHHCCEEEEECCCCCCCCCCCCHHHHHHHHHHCCCCHHHEEEEHH

SEQ ID NO: 9580 - protein, 74 aa, Methanosarcina mazei
LIEIEGIKILFTGDIFCGRSLLLNKPDVPKEHIDYLIIESTYGDREHPDKPPEEILYEEITSLGDYSRILIPAF

SEQ ID NO: 9581 - protein, 21 aa, Methanosarcina mazei
LGILYTGDDLIESTLIGVLIP

SEQ ID NO: 9582 - protein, 80 aa, Methanosarcina mazei
HFHIGDGLHNVVFTGDYKYEKTRLFDPAVNKFPRVETVISEATYGNANAFQPALKDAEKHLQMVVKNTIERGGIAVIPAF

SEQ ID NO: 9583 - protein, 78 aa, Methanosarcina mazei
EEEETTTTEEEEECCSCCSCCSSCCCCCBCSCCSEEEEECTTCSTTCCCCCHHHHHHHHHHHHHHHHHTTCCEEEECC

SEQ ID NO: 9584 - protein, 80 aa, Methanosarcina mazei
EEEECCCEEEEEEECCCCCCCCCCCCCCCCCCCCCCEEEEECCCCCCCCCCCCHHHHHHHHHHHHHHHHHCCCEEEEECC

SEQ ID NO: 9585 - protein, 71 aa, Methanosarcina mazei
HHCCHHHHHHCCCCCCCEEECCHHHHHHHHHHHHHHHHCCHHHHHHHHHHHHCCCCCHHHHHHCCCCHHHH

SEQ ID NO: 9586 - protein, 74 aa, Methanosarcina mazei
AVGRAQEIIYGLKLKGLDIPVFLDSPLAEKVAETYDYFLPYLKPEIKNKWKKMGEMFSIPHLEYVRSNKRSKEL

SEQ ID NO: 9587 - protein, 13 aa, Methanosarcina mazei
GRELLLIDELIPF

SEQ ID NO: 9588 - protein, 79 aa, Methanosarcina mazei
AVGRSQEVMIVLEESIRKGLIPEVPVYLDGMIWEATAIHATHPEYLNNDLRKLIFQKGQNPFLSECFKPVDSHEARQKI

SEQ ID NO: 9589 - protein, 74 aa, Methanosarcina mazei
TTTHHHHHHHHHHHHHHTTSSCSCCEEEESSHHHHHHHHHHCGGGSCHHHHHHCCGGGCTTEEEECSHHHHHHH

SEQ ID NO: 9590 - protein, 79 aa, Methanosarcina mazei
CCCHHHHHHHHHHHHHHCCCCCCCCEEEEHHHHHHHHHHHHCHHHCCHHHHHHHHHCCCCCCCCCCEEECCCHHHHHHH

SEQ ID NO: 9591 - protein, 75 aa, Methanosarcina mazei
HHHHHCCEEEECCCHHCCCHHHHCCHHHHCCCCEEEEEEEEECCCCHHHHHHCCCCEEEECCCEEEEEEEEEEEC

SEQ ID NO: 9592 - protein, 75 aa, Methanosarcina mazei
AEDRKKKIVIAASGMLEGGRVMNHLPHILKDENAVLLFIGYQAEGTLGRKILEGERSVWIEDKEIEVKCSIKKIE

SEQ ID NO: 9593 - protein, 17 aa, Methanosarcina mazei
PIIILGLVIFGYTLGVI

SEQ ID NO: 9594 - protein, 80 aa, Methanosarcina mazei
IQNPQPCVILATSGMMNGGPVMEYFKAFAEDPRNTLVFVGYQADGTIGRRIQKGWKEIPMTGKNGSTEMLKMNMEVQVVD

SEQ ID NO: 9595 - protein, 72 aa, Methanosarcina mazei
HHSCCSCEEEESCTTSSSSHHHHHHHHHTTCTTCEEEECSCCCTTCHHHHHHTTCCEECCCEECCSEEEECC

SEQ ID NO: 9596 - protein, 80 aa, Methanosarcina mazei
HHCCCCEEEEECCCCCCCCCHHHHHHHHHCCCCCEEEECCCCCCCCHHHHHHHCCCEEEECCCCCCEEEEEECEEEEEEC

SEQ ID NO: 9597 - protein, 61 aa, Methanosarcina mazei
CCCCCCCCCCHHHHHHCCCCCCCEEEEEECCHHHHHHHHHHHHHHEECCCCCCCHHEECCC

SEQ ID NO: 9598 - protein, 61 aa, Methanosarcina mazei
GFSAHSDRRGLINFINNLPFYPSYIFIVHGEYETQKRFADELRIQKFYPYIPSKEEEIDLK

SEQ ID NO: 9599 - protein, 15 aa, Methanosarcina mazei
GSHDLILPVHGLLPL

SEQ ID NO: 9600 - protein, 62 aa, Methanosarcina mazei
GFSGHSDRRQLMEYVKRMQPRPERVFTEHGDEKACVDLASSVYKKLKIETRALTNLETVRLL

SEQ ID NO: 9601 - protein, 62 aa, Methanosarcina mazei
CCSCSCCHHHHHHHHHTCBSCCSEEEEESSCHHHHHHHHHHHHHHHCCEEEECCTTCEEECC

SEQ ID NO: 9602 - protein, 62 aa, Methanosarcina mazei
CCCCCCCHHHHHHHHHHHCCCCCEEEEECCCHHHHHHHHHHHHHHHCCEEEECCCCCEEEEC
